United States Patent Application Publication US 2026/0258423 A1 - sequence listing, part 70

SEQ ID NO: 301568 - DNA, 83257441 bp, Homo sapiens (residues 66,179,018-68,313,824 of 83,257,441)
  source 1..83257441: mol_type = genomic DNA
atctgagtttttaattctgctccataggtccatgtgattgtttttacgccagtaccatgatggtttggttacaattgctctgtagtataatttgaagtcaggtaatgtaattcctccagttttattatttttgctcaggataactttggctattctgggtcttttgtggttccacataaattttaaggttgtttttttctatttctgtgaagaatgtcattggtattttgatagggattgcactgaatctgcagattggtttgggtagtatggacattttaacaatattgattattccaatccatgaacatagggtatctttctgtttttttgtgtcttcttcaatttctttcattaatgttttatagttttcattatagagatctttcacttctttggttaattcctaggtattttattttatttgtagcaattggaaatgagattactttcttgatttctttttcagattgtttgctgttggcatatagacatgttactgatttttgtatgttgattttgtaccctgcatctttactgaatttgtttatctgttttaataggtttttgggggagtctttaggtatttccaatataagatcatagcatctttaaacaagcataatttgacttcttcctttccaatttcgatgccctttatttctttctcttgcctgactgctctagctaggacttccaatactatgctgaataacagcggtgaaagtggtcaaccttgttgtattccagatcttaaaggaaaggctttcagtttttccccatccagtacaatactagctatgggtctgtcatatatgaattttattatgttgaggactgttactttgatacccagttttttttagggtttttatcataaagggatgttgaattttatcaaatgcttttccagcattaattgaaatgatcatacagtttttgtccaccattgtgttatgatttatcacatggattgatttgcatctgttgaaccatccttgcatccctgggataaatcctagttggtcatgatgaatgatctttttaatatattgttgaattctgcttgcaagtattttgctgaggatttttgcattaatgttcatcagggatactggcctgtagttttctttctttgatgtatctttgtctggttttggtatcagggtaatactggcctcgcagaatgactttgaaaatattcctccctcctctatttttttgaatagtttgagtaagattggtattagttattatttaaatgtttagtaaaattcatcagtgaagccatcaggtccagggctttcctttgctgggagactttttataaataaaattctgtgataaaattttgttataattttgcatctctaaaataattttagatatattgaaaaatctttctataattttaattatgtaaaccttgaaagagataaaatgcaatctctgatttatctaagcattttcaacttactctaaaattaaatcttgaatgttttatttatgaaatccaataatacccagggatttgtagctgattgattgagggttttaacatctttaaaaataattgagcactactgacatgtcattttgtgaaataattattcttttcaaaatctacctaaaaatcacagcacagtttaatctacatataatggtctatattatcttgccatgacacaggattgttttaggtctcaggaaaactattctggtattaattttttatcagtctaagtcaatttgaggattatatatctaatgcaaatcataaatctgctctaatcttttagtttacaaaggtcatattcatttattgttttacctacaaaaatacactaagaccggatttactatggtgcaaacatcatttcaggttggaaacttatgcctttaaaattttttgtattttttgatatgaaaattatataatcataaaataaacttcatgaaatattgggaacactttgaacaagaagaaaatacaaaagtgaaactgataaacttaagtaaatagtttttcaatctacatactttccacatcccatagcaaactgaaatctatataatattctaatgtccagaatttagtacaatttggttaatgaaagcattcctctatgtaaaataatgggaaaacccattatcacaagttgaatttagcaataagatgtaatttattatgaatttctagttcttgtttaagatgtgagtttcagattgcttattataaactaattaaataaaagaatgccatagatgtaccaatactgacaatgtgtcaaggaatcaaagattataattaatgaattctatgtacctaacttttttttttcttttgagatggagtctcgctctgtcgcccaggctggagtgcagtggcgtgatcttggctcactgcaagctctgcctcccgagttcacgccattctcctgcctcagcctcccaagtagctgggactgcaggtgcccaccaacacgcccatctaattttgtgtgtgtgtgtgtatttttagtagagtcgggctttcaccatgttagccaggatggtcttgatctcctgacttcatgatccacccgcctcagcctcccaaagtactcggattacaggcatgagccaccgcgcttggcccctaaaatctttttttaaagaagataaaatatggggatggtttgatttgaaatacatttacaatgagaaattttaatacaaatgtttcctaatcagcaaatctaagacaaaaagaaaaaatgtagtgaatatcagaagaggatgcaatataaaaatatcattagatatcattcaaataatcatgaacaagtcataggacatgaaatagtcatttgaaaaatagcagaggaagaaagaagaggttaaagcctgacaaggtcaagagcagaaggcagaggaggaggtcttcaagggaagaccatggcaacttacccaggactaggaaaggttgaaggccctagaacaataagtgaacacggaatgcataatttatatatcatactcccttctcctaacacagctccctggaataaatgcaacagtctccacttatccatggtttcgctttcctctgtttcagttacctacactcgaatgcagtccaaaaataggtgagcacaatacaataagatattttgaaagaaagagggaaattactttcacacaatttttgttacattatattgttataattgttctattttattattagctattgctgttaatctcatactgtacctaactgataaactaaatttaatcatcagtgtgtatgtataggaaaagacagagcatatataggttttagtactatcagctgtttcaggcagcctctgggggtcttggaatgtattcctcaagattaagggggattgctatatttaatactgagtcagttcctcactgaatatagagtctactcagacaccttagggaaacaggcaacttacagaaagtaaaagccatagtttcttggtcccactccaaacctaccactcaaaagctaccaagtcatatttacctttacagacaatctcacacctactacgccttagagaatcttcccagtccccaaaattctccccaattgttctctagtgtcttaagttacatgaaaattctctaacttgagaaaaagactttcattccataattagaaataacaggccaggaattggagacaagatagcaacaaaactttattcacactggattttgttctgccaacaaataagcataaaaaaccaatagattattttctgctttgatagacagggccggagaacaggagaacactaggctcctcctgtctctggccctttccatagaaagaagaaaaatttgcaagaaaaatttccatagagaaaagaaaaagatgcaagaaaaaaggttgtagctaactttagagatccatgtgctataagttcatgacatgtgagacgaggcatcacaataagatctttccacagtttggcaggacattatcactgaatgtctatctacccttgaacaactcagtgtaaacagtcctatgtcaatggcaaaaattgttactagagaaattcagtttttcttccatgttgatagttcattggtttgactaaataatataaagaaaaaaattaatcttaagaatctaatcttcaaacataatcttacctgtcctatgaggtaattttagaacaaagggcttcatatcaaccacaaagtgatcaaattctgcatccagcttctcccatttttcttcttcacttcccacttccataatccaatctgtaaaagattttaaatcaaaatattaaggatttgtatgctgaaaactacaaaactctgatgagaaagataaaaaaaactcttaagtgttagatatcagttctccccaaattgacctgtagatttaatgcaactcccatcaaaacccagccgtattatttgtagagataagcttaattctaaaatttacatgaaaaagtaaaggaactaaagagcccaaacaattttgagaaagtacaaagttggagaactcacattaccagattttaagatgtactccaaagccacagtagtcaagacaattggtattggtgaaaggatagacagatcagtggaaaagattagagagtccagaaaccagaccaaaacaaacataaacaactgattttcaacaaaggtgtgatccatgaagaaatgacagttattacaacaaatgatgtcataacaattggatatccatatacaaaaaaaaaagaacttcaacctaaacttcatcctgtatataaaaattaactcaatatgaatcacagacctaagtgtaaaaatgtaaaactatacaactcttacaagaaagcatgggaggaaatctttgcaaacttgagtaaggctaagatttcttatatacaacattaaaagcactatccacaaaaggaaaaactgaccaggcatgatagctcatgcctgtaatcccagaactttgggagtcccaggcaggaggaatgcttgagctcaggagttaaagaccaccctgggcaatttggtgagaccccatctctacaaaacaaaaaaaaaattaaaaattagccaggtgtagtggcacgtacctgtagtcccagctacttgggatgctgaggtgggagaattgtttgaaagtgtgagaggtaaaggctgcagtgggccatgatcgcaccactaaactctagcctcggtgacagagcaagaccctatctcaaaaataaaaaagaaagctgacatattgaacttcacaaaaaaaaactgtcctgcaaaggacgttgttaaggaattgagaagataagccacagaccagaacaaaatatttgcaaatcatacatctcatacgagacttgtatcaagaatacataaggactctcaaaattcaacaatcagaaaacaaactaccccgataatcagcaaaaaaaattagtccctttaccaaagaagaaatacagatggcaagtaagcacatgacaagatgctcaatatcattacagaaatgcaaattaaaactatactgagataccactaacattaaaaatgcaaacaataccaagtgctggtgaggatggacaacaacagaaactctcatgcattgctggtagaaatacaaaatagtacaggcactctggaaaacagtttggcagtttcttacaaaaataaacatacactcagcctatgacccagaaatcccactcccaagtatttagctaagtgaaaagaaaaatctatatacacaaaaaaatccaaatgtgattttttttaaataaccaccaaacaactgaaaacagcccaaatgtccctcaaatggtgactagataaactgtggcatatccacacaataacatagtactcagcaacagaaaggaatgaactgctgatacacacaaaacatggaaacttcaaatccttatgctaagtgaaagaagcccttctcaaaaggctgcatactaattccatttgtgtgacattctagaaaaggcaaacaatataggcataaagaacagatcagcagctcatggggatagcagtgggggcagagtctcaacacaaagggatggcacaaagaaacgatttggcatgttggaatttttctgtacactatctatgtaggaagttataagaacctacagtggcaagaactatatgccaaaaaaagtgcatttgctgtatataagttaaaaaaaattttttttgagacagagtcttgctctgttctccaggctatggagtgcaatggcacaatcttggctcactgcaacctccgcctcctgggttcaagtgattctcctgcctcagactcctgagtagctgggattacaggcacacaccaccatgcccggctaacttttctatttttagtagagatggggtttcaccatgttggtcaggctggtctcgaactcctgacctcgtgatccatccacctcagcctcccaaagtgctggcattacaggcatgagccactgcgccccgccaaatttaaactttttaatcctttttaaaaactgtaaaatattggtcatcatacttccttctaattaacaagaaaaacactgaatacaaagggggtgaatcccaaaaatcaaaagtgtaggttttgacaaaatttgttaagttaaaaatacatacacacactacatgttcctttaaactgtgaaatgtcctgatagggatgtgcgctacctttacattatgaatagtgccaatttgtcatttattccatttacaaattctatattcggtgaaaagctttgttctgcctcataagctatcttgctccacaaactgccctctatctgctaaaccagcttctaatatttaccacattatcaaatggtttccatcatttcatcattaacaacctcttcatagaaagttctctctaccctgtctctgtaagtaaatcgtagcttttacttgctgactttactttcctcagtcattagaggtaagccaaggtctctcataatctctctcattctctctctctctctctctctccccacccgctctctcatgcatcctctgtagtctttcactttctccactcaaccatgcaatggaaggaaaacacttaccaagatccatcctgccacttcccaactactgctcttcctccctcagccccaaaatccctcatgaggctcaacgctccaaccatctgactaccatgtactcccctttctcatctctgtcatcttgcaaagaaacccgtctgaaactagcctcttgtcctcttttttcttttcgtttcgtttatttctttcgttttttgagacagaatctcactttgtaacccaggctggagtgtagtggcacgatctcggctcactgcaacctccacctcccgggttcaagggattctcctgcctcagcctcccgagtaggcacccgccaccacgcccagataatttttcgtatttttagtagagacggcgtttcaccgtgttagccaggctggtcttgatctcctgacctcgtgatccgcctgcctcggcctcccaaagtgctgggattacaggcatgagccaccatgcccagctgcctcttgtcctcttaaatgctctcttcttattccactagatctttcctttctacttggcaaggctgcaatcccttgatgccctccttcatgctctacagggttgctgggaaaaaatggcactgccttatagtcagatggcttccaacattacctgaaccctcaggagtcttgctatttcctactccacaaagcaactttaaaacttttcccaaatatcctacagccccttgaataactccagcttctcctaactctcaatttaaaaatcataaatcttgcttcagggaaaaaataatagtcaggtggtaccaccccaagatgttattcctcccacctctcaacttacctctcagagaaaacactcttccacctctgctcctgtatcagacgcagtaactctccctctacctgtcctctatcaattgcctatttgctatgtaaaattttccatctccactcactccttcccctctgatggcagctgagaaatatctcaaaatctgcctgcttctctattctcactgccacgatctcagatagaggcctgcccaccacttaacttgaactactgtggcagcctcatcatctgtctccctactgtcagttttctctacttgagtccattttcctcacctgttccagaatgagtttcctaatgacaaagctaagtctatcacttcctgtttaaaaatctcccctcattctagcattccattcgccaaatccacttactttctccacttcatcaacttctatccagatctcaccccctgtatattacctcttctatctccatcatggtagcaaaaatctttcaaagttcaccagtgatccactaattgccaaatccaaagggctgtcttcagtttgcatcctatttgacatctccacagcatcttccacttctgacaactccctgctcctaagaaactcttctttgacttcagtggttccattcactgctggctcccctactgcctcagatcattccttctcggtctctcaatggctctggcttctccagtcaatatggactctccagtgctctttccttagtctccttttgatctgacttttcacactcgcatagtgattgtattcagtaccatcgcttcaagtattcgtttcatgccattcacccttaaattttatttcaaactccagcctctctttgcaactccagactcatttacaatagctcctggacctattcactaatgtcctgtttattatctagatttatatgtccaagaaaacaatccttgatgtttttctccataaatctatgatgtactctgcttgatgacatcatcatctacttcatctcccaagctagaagtttcaatgttcccatcctctgaacccccataaaccaatacatcaataaatgctgagaaatatctcaaaatctgcctgcttccctattctcactgccacgatctcagatagaggcctgcctaccacttatttgaactactgcggcagcctcatcatctgtctccctactgtcagttttctctacttgagtccattttcctcacctgctccagaatgagtttcctaatgacaaagctaagcctatagcttcctgtttaaaaatctctcgtgactgcctaaaacagaatactatccaaacccaaagttaggcatacaagtacctttgcatttaggcctgtctctcacaccacacacacaaacacacacacacacacacacacacacacacacacacacactttgcctaactacaccaacccacaaatgcccacttccctcttgccacaatgaactcctcaccatggtcaaacccccccccacccccgagcccttatctaatcccacccccttttcataggctattccctccacctggagtcaggtaaatgcagctcaaatgtcacctgagtgaagctggcccccccttgccctagactggctgttgctctgttctcagtgtaaactgttcacatctgtgtacagcatttatcatgctgtttttttttttttttacacatctgtgtattattatgcatacatcttccattatctgtgagaagctcctagaaggcagggaccatgatttacacatcttagtaagtacctagcttattacctggtactcatcattttttgtttggttggttttgttttacatgtatacaatatattccatcagttatgcacgtggtaacagaaggctatgataccagtgctggatgtgagatcataatgttgaaaagcaacaattcaaatagatgaacaaaccaatggaaaatcataaacccagagttttaaagcacagctctggcctagatgtactccggggcttaaagactatatactgcccacgtactcaaacatttgcctgagaacatctatagctaaagcaaaataaaaaagattcctcctaatcactaattctcaataaatcctttgacatgggcaggaaatgttagtgtttaacattagaggaaactaaaattcaaccattaaatgactaactcaaaatcatgaaatcaagcacaaagctcagattaaaattctgaaacctctagccctcagatttattatattggccatttacatataagtgagcaatatctccaactaattaaaaagtattttgaaggccaggcgcgttggctcacacctgtaatcccagcacgttgggaagctgaggcaggcggataacttgaggtcaggagttcaagaccagcctggccaacatggtgaaaccccgtctctactaaaaataccaaaaaaattagctgggcaaagtggcacacacctgtattcccagctactagggaggctgaagcaggagaatcgcttgaacccgggaggcggagtttgcagtgagctgagatggtgccactgcactcaacctgtgtgacacagcaaaactctgtctcaaaaaaaaaaaaaaaagtattttgaaaagtagaaaggcaattggaattgctatattgacatgcaatattgaagtatacatttaaaaaaaaaactaaagaatcaaagtaacatttggtaaaaactaaaaatctgcttcttcttatcccttaatttttctccaaaaaaataaagaaatggaaaaagaaacaaaaaaactaacatttcaaaccttcaaggaattattgctatacaaattacatcttattggccaggtgtggtggctcacatctgtaatccaaacacttcgggaggccaaggtgagtggatcatttgatcccaggagttcaagaccagcctgggcaacatagtgagaccctgtctctacaaaaaaatacaaaaattagccaagcatggtagcatgcatctgtagtcccagctactcgggagactgaggtgggaggatcacttgagcccaagaggtcaaggctgcaatgagccaagatcacaccactgcactccagcctgagcaataaagtgagaccctgtctcaaaaaacctgaaaatggaacgggtgcagtggctcacacctgtaatcccagcactttgggaggccgaggcgggagggtcacctgaggtcaggagttcgagacaagcctggccaattaaaaacacaaaaattagccgggcatggtggcaggcacctgtaatcccagctactcaggaagctgaggcaggagaatcgcttgaacctgggaggcagaggttgcagtgagctgaaatcatgccactgcactccagcctgggtgacaagagcaaagctccgtctcaaaaaaaaaaaaattgaaaatgaaaaataaataatttaaaaacaaattacatcatattcacaaattgtatctaagttccaacttatcaaaagtttcataccatttatcagaattgaaaatttaaattactggaattgaaaaataagtaaagcaacatctttggcttaggcttagagtaattatagtgtgcctatcagttatataaattatttcaaaggtaacccaggtgacggacgttgcagtgagcgtgagctgagtttgcaccactgcactccagcctgggccacagagcaagactgtctcaaaaaaataaataattccaaaggtaaaaaagaagtaaattgggtgactcttgcttatagctacaatctatatttggatcatgtcttttattaaactcacccatgctgcctttttttaaacttctttttggacagctacaaaatgggcttacctaccctacagtcagcaaacataaccaaaccacaagtattaaaaggtctgggaaaaaaaggagtcacaactgccaagcaaagaatacacttcattcatatcacactccttgccaaacaaaacaaacgttcttggaagttgtgtaaaacccattttgttcaatcaaatcatattttaaatatattgtgggtcattaaagaaaactggaaacgtcgacaaattaaaaaggattagaggtgcacgttttctctggcttacacgtgtggatgttttgacaagagccttccctgactctacccgtagctcagtgtgtgctttagaaacaaatctcagtttattctctggcccggccctaccatttccgcaccatttccatggtcatttcacagaggaagaaggaagctgaggcttaagtgaggtgaagtcactgacctaggttcttagtggacagtgacagctgggcctgaacactgcacaaattattaataccatgcattccactaagctgcagcctgaccactgtggagaggctcatggaatttaatgtgccttttctatcttattttgactcatcttaaaatattaaaaacaaataaaagtagccgtgcaatgatcagaaaagctgttcacatttacttatgtcgttctcttgaacacttaaaaataattaactcagaaacacagggtagcatcctacatgcggcggtgctgggcttgggcctctccaagcggcctatgactttctgcaaaccaaccagcgccctggttctgtccccgcaaatccagctgattgttctgagactcttttctgggacggaattgaaaactccagcggtgccgttcctggcagtcccttcctcggcccgccgaggcccaggcccaggccgcgctcctaccttgtccaggacacagatttcctctcccagtcgcaaacccttgggtcagactcttggaccacgtcagaccgatcaaaccggctgatcaaactttacttagaactttcccaagtcgtcccggcctggatcgcgctctgcctgccggggacaccacagcgggcagcgccgggaccccaggggcgcgcgccccccaggcccggagaacgggcccagggcctgagggcgacgccccttcccgaacgggcccgcaagggcggggcggcagccaccggcgcaaaattccactcaagaacctggtgggaggggcgggggaaggaaattcagaaaaaaacgagaacctggcaccaccacacgcaagctttccgctcggccgctgccgccaacgccgccgccaccgccgcccctgccaaacggtttcaaatccttgcgggccgctgggtcgccgccgcccagcagcccgggggcggggactttcgcgctcgcatttccccgccccctactccacccctctagcctgcggtgcggttgccatggcgacgttcccggcggcggcgaccaccggcgccccaggctgggggcggagacttccgcgcgggcatttctccacccacaggtggcggcgtgcgcgcggccccgttgccatggcgacgctcctgctggcccagcaaccgccagactcgcaccccagcttgtgggccccttggcgggtccccagtcgaagcttccgggataacccgaccacagtttgaatgctgctgccctcccgcatcccgcgcagagtcgcttatgatcaccttaggggccgtggcgaaaaaataagggcacagaaaatggggcggctggaggatgttcacaaaaggggtgatccgttatgtggacagacatcagagttgaatgggtctcaagtgaaaatttcctcactctctgatatatcaaaacccaagtcaaattcttcaaaaggttctttttaaaacctatctcactggaagtaaacaccaacagctagctcttccttgtctcaaagacaaatcatgctaaggaaaataaagggtacagaatgcttttaagaatgtttagttttcaaaagcatacttgaacatgtttataactagggaatgatatataatccagataattagtactgagaatcaaggatgcaaaatcaagcatgcaattgcaggaatttaaccagtcagttaatacattcaagatagataaactggccgggcggggtggctcacgtctgtaatcccagtactttgggaggccaaggtgggcggatcaggaggtcaggagatcgagaccatccgggctaacacggtgaaaccctgtctctcctaaaaatacaaaaaattagccaggcgtggtggcacacggctgtaatcccagttactcgggaggctgaggcaggagaattgcttgaacccgggaagcaaaggttgcagtgagccgagattgcgctactgcactctagcctgggcgacagagcgagactcaaaaaaaaaaaaaaagataaactaccctactccagcctcaggaggaggaggacattggtcaaaggaaacaaaatttaagttagattggaggaataagtctaagcgatctattttacaacgtggtgaccatagtaaatgataatgtattgtgttcttgaaaattgctaaaagagtacatcttaagtgttctcatcacaaaattaataagtatgtgaagcaacgcttatgttaattagcttgacttagtcatttcacaatgttgtgcataataaatatatgcaatttttagaatcataaactgcattgctgaaagaatatgaaatgaatttgacaaatggtgtctaaataaacatgaaaagaaaaatagaagataaataaatagaagataaatcaaagaaaaaatgtaacaagctcaagctcatctcagaggaaataactatagcagaaaaatataactgaaaatgaaaaatgtctttaaatatttcctctacttaggtgaaaataagatgagtagatctcccttcccgcttttaagaacaagctgattgtcatttttttcatttatatatatcattttcatttatatatttttcattcatatatacacacacatgcaaataaaaatattaagatatgcatagagagttttattatttatgttatatgtatataacatgaaagggataccagcttgagcctgagctgtgttcaccttagaactcaagcctacatgtcatgtttagacgactggtaggcaagtttcacttggaaactccttacctgagaaccaaggaacctcctagaaattaagtcatcctggctgagcatggtggctcatgcctgtaatcccagcacttcgggaggctgaggcaggtggatcatgaggtcaggagttcaagaccagcctggccaatatggtgaaaccccgtctctactaaaaatacaaaaattagcaggtgtggtggcagacgcctgtgatcccagctactcaggaggctgaggcaggagaaccgcttgaacccaggaggtggaggttgcagtgagccaagatcacgccactgcactctagcctgggtaacagagtgagactctatctcgaaaaaaaaaagaaaaagtaagtcatcctaaagagatctggttcaatggcaatatgcaaaattgaaggggaaagtgatgatgcatgaagcaaagtgttggccgtgagttgcccttcatgtagcatcttcctctttgtataagagagtgattcctaatcttacagtgtaaagaacttcctttgagaattttcttttttctttttttagaggcagagcctggctctgtcacctaggctggagtgcagtggcatgatcatagctcactacagcctccaactcctgagctcaagcaatcctcccacctcagcctcccaagtagctcagtcagagacagagcactatgatagggtagttccatcatacacagagcacccatgtgactcaccctggggacctctacaaatatttgggaagaaattgctgaactcagagcctattcaggaacctcaaggatgaagccaggtaaatattctcttgtcggccaggcgtggtggctcacgcctgtaatcccagcactttgggaggccgaggcaggcggatcacgaggtcaggagatcgagacccgcctggctaacacggtgaaaccccatctctactaaaaatacaaaaaagaaaattagcaggcgtggtggtgggcgcctgtagtcccagctacttgggaggctgaggcaggagaatggcatgaacccgggaggcagagcttgcagtgagtcaagatcgtgccactgcactccagcctgggcgacatagcgagactctgtctcaaaaaaaaaaatatatatatatatatatatatattctcttgtcactgttgtagtgtagctccaggcttatgtggcctaaaaaatgcagtgtcttataaatgttttatggccaaacacctatggtaatcaatgaattttccttctacgtctagttactgcataaagataataatcttccaactcaatgtacatttattgaacatcaggtatatgcaggcatattaagggaatgtttcctccactggaaatgctatgacactttgctcttcaccttagcttaaatatcagtacctcagagaggccttcactgattctcaaaccagcccttatttcctttcaaatcccctggttctcttttcttcattgcatttatcaaaatttgtcatcaaatattaattagtggaatctatttatttatttatttatttatttgagacggagtctcgctctgtcgtccagactggagtgcagtggtgtgatctcagctcactgcaacttccacctcccgggttcaaacaattctactgcttcagccttcagagtagctgggattacaggcgcgtgccaccacacccagctaattttttatatttttggtagagatggggtttcaccatgttggccaggctgatcttgaactcctgacctcaagtgatccacccacctctgcctcctaaagtgttgggattacaggtgtgagccactgcacccaacccaggtgtaatcttttaaaaatgcctatagtttccaaaagaatgaagacgatacctgttaggttcaccattgcacagacagcaccttgcagggtacctaccatatagaaacaatccataaatgttcactgaatcaccaaatgaatgaacattaattttcgtgcttttctctgcacatgtggtagaatatgaccaccctatgcataaagcttccagtctagaaacccggaagactaacttttctgaatataaatctcttgctacggagagtgaaactgagtgatctaatttgaatcaggtaagcacaattagtccaatgagatatggccaggagatagggcatcctattgtataaacatgactttcttagctcatctttgcactttggggagagggtttggggttattttctcagaggactgaactgatgggtaaacccaaatggttctaactacaacaaagattctggacttatgagaaaaaagataagtctctaccctccaaaaatttatgagatagtaggaggtaataagacaaataccaaataaccacatttcaactcagattatgtcacctggcttaaaaggtatataaataatgcagctgggcgcgatggctcacgcctataatcccagcactttgggaggccgaggtgggcggatcacaagctcaggagttcgagaccagactgaccaacatggtgaaacccccatctctactaaaaatacaaaaattagccaggcttggtggtgggcacctgtaatcccagctactcaggaagctgaggcaggagaattgcttgaacccaggaggcagacattgcagtgagccaagatcgcaccaccgcactgcagcctgggtgacagagtgagactctgtctcaaaaaaaaaaaaaaaagatataaatcacgttttgggatagagaggaaataaagaaaacaccgtgctgtgcttataaagtcagcataggaaaatatatacagaaccttgttttatctttgataaaaagagagtgacattgaaacactatttctattgaaaatattgtttcctaacagctacaaatgacttaaatgaaagtaggtttgtttcaaaaacaaatgacatcttatctcaatttttaaaaatcaaatggtgacattgttgataatggtagtacaaagaggaccctaaaaataattgtttttattttctgtgtgggaagataactgtgctatacttcccatgttgaaagggatctgcttattttcaaaatataaacttaagaattagtctagatgacattgaacaatgtgaattcaattattctctacagaaaaaatcaataggaaaatgtgagcttttattaattagaaagataattattcgtctgtaatttgaactaatctgtatcttgaaggattaaatctgatgatctgtatagatatgtatgtgtgtatatatatatatatatatatttttttttttttttttttgagacagagttttgctcttgttgcccaggctggagtgcaatggcgtgcttactgcaaactccgcctcccagcttcaagcgattctcctacctcagcctccccagtagctggaattacaggcatgtgccaccacacccgactaattttttgtatttttagtagagacagggtttctccatgttggtcgggctggtctcgaactcccgacctcaggtgatccacccgccttggcctcccaaagtgctgggattacaggcatgagctaccgcacccggccaatctgtataatttaaactcttgctccataaaattaaagtaactatagtgggagacctagagattaccgttgtttgtttaagccactgttatttgggttttttgttttgctgagggaagaagagcctgggcctgatggagccccagggaaatcactaccgctgccggtgtttgcaggtagcagggagccaggcctgggcgaggtgtgtctcgatgccagagctggtagtacagaaggtggtgggccatccccggtgctgctcagcgtggtggatcatttcaaccgaatcggcaaggttggaatccagaaatgcgtcattggtctgttttgggggtcatggcaaaagaaagtacttgatgtattgaacagttttgcagttccttttgatgaagatgacaaagacaattctatgtggtttttagaccatgattatttggaaaacatgtatggaatgtttaagaaagtcaatgccagagaaagaatagttggctggtaccacacaggcctgaaaatacacaagaatggcattaccatcaatgaactcatgaaaagatactatcctaactcggtattgatcattattgacgtgaatccaaaggacctagggctgcccacagaagcatacatttcagtggaagaaatccaagatgatggaactccaaccttgaaaacatttgaacatgtgaccagtgaaattggagcagagtaagctgaggaagttggagttgaacacttgttacgagacatcaaagacacaacacaacggtgggcactctgtcccagcggatcacaaaccgggtccatggtttgaagggaccgaactccaagcttctggatatcaggagctacctggaaaaagtagccacaggcaagctgcgcatcaaccaccagatcatctacgagctgcaggacgtcttcaacctgctgccagatgttagcctgcaggagcctattaaagccttttacctgaggaccaatgaccagatggtggtagtgtacttggcctcactgatccattctgtgggcctcactgatccattctgtggtcgccctgcacaacctcatcaacaacaagattgccaaccaggatggagacaagaaagaagggcaggagaaaaaagagagcaaaaagatagaaaagctgacaaggggaaagataaagataaggaaaagagtgatgtaaagaaagagcagaaaaagtaaaacgtgtattaaatagcttttttatgcctgtaatcccaacattttaggaggccagggcgagtggatcacccaaggtcgggagctcgagaccagcctgaccaacatggagaaaccccgtctccactaaaaatacaaaattcgctgggcatggtggcacatgcctgtaatccagctacccaggaggctgaggccagagaatcgcttgaacctgggaggcatagtttgaagtgagccaagatcacaccattgcactccagcctgggcaacaagagcgaaactccgtctcaaaaagataaataaataaaattaaaaattaaaagtaaaaagttttcatggtttcaaagtttcatttcccttataaggaaattgaaaaatactggaaagtttaaagaagaaaagacttatgtgcaatcctgccattaagtaataactactattaacatttgtatatatttactcaaatttttatatctatattatcatttttaatatctacttattatgtcatcatatggatatgataattttctcaattactctcctgtgtttaccaattcttgcccttataaataatgttgcaatgaatgcctttgattatatacatcttggttgaaattttagctctctccataaaagatattcttatgggcattataaaagcattaaggcttttgatcagtactgccaaatcacttactggaagtatttttcaaattgcaacttcactcaatggtctgtgcgaatgactgtctcacattaatggttttttagatctgtgctaattgtgtgtaaaaaaaaaaagcatccctttttactttgcatttttcactattagagaagttgaaatatttaaatatctctattagtcttttattcttctgcaaagtatctcttttgtcctttatctatttttgtggaactttatatatagttatatggatatattagacagatataagtatcttccatatttttaatttattgtttcaaaattagcaatatgcataagctaacattcaaagcaatcaaatttccgtgattcaccattttgcattattaagatactccatcattagagtgaaaaatgtaaatgacttttagctatctagatggaaaacaatttgtaaataccaagaattgtaattattatataaacacattagagacaaatatgaaaacaatcctgtacctggtaaattccttaaactgaatggtaagtaatgcagaactttctatttacagaccacagaagtatagattataccacaaatgaatgcattataggccaggcacagcggctcacgcctgtaatcctaacactgtgggaggccgaggaaggcagattacttgagcccaggagtttcagaccagcctaagcaacatagcgagaccctgtctctatttttttaatagaataaataaataaatacagtataaagattgcagaaactaagaatgaggaggcatattttctttttttcactactaagaaaagagtcactgcctttagcacagtgactttggatttcttccttatgctagaactaagcaatattcaccatttcattcctccttctgctgctttttctatcttagcctcttgggcaattcatgctataggatattaacagagataaactggctactctttctcccttcccttcagtgatatacatattgccataatgccctagccagtatccataaaaactagcaacctaggatacttccaagccttgaatatacaacaatcttttctaccaacttgtttcaggagtaggctgtaaaactccaactttagaatgcaaatatttccaggaagctactgggaaaaatcatagcttaactagcagtataaaaatggtacgaaagaaatcattctgaagtttagatatctggttctgtcatttattagctttgtgacctcggtaaactaagttacataatcttcctgagcttcagtttatttattttccttatgggatgattggggagattgaattaacagaggtgagatatgtagaaaaatgtacccagtgcctgacacaggaaacttcaatatgagggcttcttttctttcccaactgttttgccagcactttggaaaggaatagatgccactaggaggcagcaatggcacacaaagaactaattatcatgtgcacgtgcatgcgcagacacacacacacacacacacacacactcacatgcatacgcatgggcacatacacaaagcacacacactcaaaccacatacacaaatccacatgcatgccacacataccacatatatactcacactcacacaaaagcaacaaatatttgcacagcaaccacatacacacccacacacaggcatactggcacacacatgcacacagctcaagttgttttctttccttttctttctttcttttatctttttaatcttttattgagagattaaagcagggaatgatcctcaggttaatagataggaaatgtcactgaggaatagtacttattattaagtttggggcacaggaaagagatcctatatattgaaagattggtccatgtattagaaacgagagaattatgttataaacttcttgcagaaatatagcataagagatacgtgaaaacattgattcctttgcatttagaacgccgtcctgccataaaccaagagaaaaaagacggtcattgagaagcaccttcagggaccaacttgtcttggaagaagacctccctagccatgtgcatttatagagtgtatagttatatagttatatgcatttgtagagttacagttatatagtatagagttcatttagtctatgattgctaggtgagtaatattactttgggaagattcagttcaactgtgcaaaaatagaggatgggcggggcgcagtggctcacgcctgtaatctcagcactttgggaggccgaggcgggcggatcgtgaggtcaggagatcaagaccatcctggctaacacggtgaaaccccgtctctactaaaaatacaaaaaattagctgggcgtggtggcgggcacctgtagtcccagctactcgggaggctgaggcaggagaatggcgtgaacccgggaggcggagcttgcagtgagccgagattgcgccactgcattccagcctgggagacagagcgagactccatctcaaaaaaaaaaaaaaaaaaggaggatgataaccagctccttatggttgtggttctttcttcactaggctacctgtggcggttagtacttcctgtaccatctccagtagggggagatcaccgcaaactatggctagggagggtacggcacaactgtgatgacaggcaacctggtgatcaaagcatttaagaagaaaaacacttgaaaaagggaatctacttatggcacaaaatagaccacataatcactaaatagaggggctgcaattgggcagtttctaccgatggactcctcaaatccaaattgcctcttccaattacaaaaatagcagatttttatttctgtgaaaatacgattaaatgagaggaatcaggactatcgtctaagctctaaagtctgctctgattatttttcagtgatccaaacctatccagccccctaaaatgccttccagtgaacaaaatggcacaaaacacaaccttcaacaaacttgccatatcccaggagcttctttgtagaataggctggggaagggaggagtgttggaaaagtgctaagggtttaaaacagaagtgctgaggtgtcaaagttaggcatgctgactatctggtgctatcaaaatgcagacctaattattgtgtatatgagtagtgcatgtgtacataaatatgtgtatgtatttcctagctctgtctgttgaagaagacctagaagcagtgatgcctctgtatcaatgagcactacacccagacacaatgcagaccttgatttctttttttttttttaagacggagtctcactctgtcacccaggttggagtgcagtggtgaaatctcggctcactgcaagctccgcctcccggttcacatcattcttctgcctcggcctccagagtagctgggactacaggcgcccgccaccgcgcccgccaccatgcccggctaattttttgtatttttagtagagacggggtttcatcgtgttagctaagatggtctcgatcttctgacctcgtgatctacccacctcagcctcccaaagtgctaggattacaagcgtgagccaccacgcccggcccagaccttcatttctaaacaccgttatcttcagttcattggggaaatggctgaggtttagaaagctgaggtttacaaattatgacaagcttggagtattgtgttttaaccaaaagcatggtggtgcacacctgttgtcccagctactggggaggctgaggcaggagaattgcttgaagccaggaggcagaggctgcagtgaaccgagatcgtgccactgcactccagcctggctacagagtgagactccgcctcaaaaaaaaaaaaaaaaaaaagaagtggtggagcaagatggccacatagagacctccagtgatcatccccctcacaggaacaccaaatagaacaaccatccatgcaaaaaagcaccgtcataaccaaaaatccctgtacctggctttaaaattatatcaaggaaaggggcattgaagaggctgggaaagacaatctcgagttgtcgacaccacccctcgctcttccccatcagtggccatgtggtgcagagggagaatctgtgtgcttgggggagggagtgtgaactgtttgttggactttgcattggaattcagtgctgtctgtcacagcagaaagccacacagggcagaattcacctagtaaccacgagggagcatttagaccagccctagctggaaaagaatcatccatcccagcagccagacagaacttgagttccaactagccccactaccatggggtaaagtgctctggggtcctaaataaacttgaaaggtggtctaggccacaaggactgaaattcctaggcaagtcctagtgctgtgctgagctggagccagtggtctttttgtgcacacaacctgtgagacaccagctggggtggccaagggtgtgcttgtgttacccctcccacgacctcaggcagcacagcttgcagctccaggagagactacttccttctgcctggggagaggagagaggagggtaaagagaactttgtcttgcaacttgcattccagctcagtcacagtagaatagggcaccaggctgaatcctgaggcccccgttccaggccctgtctgctggacaacgtttcttgacacactctagccactgtcttaaagagaagtaccggttcaggcaggattcattaccggatgatccaagagtcctcggacttgaattaacaccaccagttgccaggcagtactcaccacaagacttgagtgagatcccgcgccatgccgacttcaggtgtgacccagcacatttccagctgtggtggtcacagggagagactccttctacttgaggaaaggagaggaaagagtaaaggggctttgtcttgcagcttgggtaccaagtcggccatagtgggatagagcacaaagcaggatcctggggtccctgattccaggccttggcccctgagtggcatttctggacttgctctgagccagaggggagcacagtgcccagtgcatgaaggaagagactgaagcctggcagccttcaccacaagctgactgaagagctcttgggccttgagtgaacatcactggtagccaggcagtgatcactgcaggcctgggattgtggtgactagggggagagactccttctccttgagggaagaagatggaagagtaggaaggacttcatcttgcggtttaggtgccagctcaggcgcagtggaaagagcaccaggtagattcctaacgttcccaagtccaggccctgcccagacagcatttctggacctgccctgggcttagggagagctcaccaccctgaagggagggacacaagcctggctggattcgccacctgttgactaaagagcctttaggccttgagtgaacaacagacggtagccaggcaagacccagtgccgtgctggcttcaggtctgacctagtacagtcccagttgttgaggccacaaggctgcttgtgtcacccagctccaagcagttcagcatggagaaagagactctgtctgggtgaaaataagagaagagagcaagagtctttgcctggtaatccagggaattctcttggatcttacttaagaccaccaaagtgataccttaagagctctgcaagagtcatcattgctgggcttagggttctcctagtgcacatattgttgcagtgaccaaagacttagatcacaacactcgattgcctttgaatacttggaaagccttcccaacaaacaagcccagactgcaaagactgcaataaatacctaactctttaatgcccagacaacaattaatatccataagcatcaaaaccatgctggaaaacatgacctcaccaaatgaactaaataaggcaacagtgacctatcctaaagagagagatatgtgacctttcctacagagaattcaaaatagctgttttgagcttcctcaaaagtcaggataatacaaagaaggaatacaaaaggataatacaaaattcagaaaagtacaaagaaggaattcagagtcctgggccgggcacggtggctcacacctgtaatatcagcactttggaaggccgaggcgggcggatcacctgaggtcgggagttcaagaccagcctgaccaacatggagaaaccccatctctactgaaaatacaaaattcactgggtgtggtggcgcatgcctataatcccagctactcgggaggctgaggcaggagaattgcttgaacccgggaggcggaggttgtggtgagccaagatcgcaccattgcactctagcctgggcaacaagagagaaacgctgtctcaaaaaaaaaaatttgttttttaaataaaattaggaagtacccaaaggatatggagacatatcaaaaagacacatgagccacttgaagtggctcccactgatcaattctgtgacaactcaagcatcaaaataattaattatattagtgaatcataactcactgaataaggatccatgtgttcacactaatattaattaactaattaatttggggaaatgggaaagtactcccttacagcagaatgagaaataataaatgtagaaggagtgataaatttaaaaattacttgttggcaaccatcacaaaaacaattgatttaggtaaaaatctaaaattactggatgaaaatttgatgaaaaacaggatatccacatagttgtgaagtatctccccatgagatactgattaattaattacaaaggacaatatagtaagattacaatgtagaaatctggcagacatcagatttctagccaagtaatcatagttaacattaccaatagtaatggcataaattgatatcatgtacttcctgatatgatgcactaagaagattacaatctcacttctcttgtaatcccggcaacaatacaactgaaatcgcgtcataacataacttcagacaaacccaaatgattgtcctctactctttaaaaatattaagattgtgagggggcacagtgtctcacccctgtcatcccagcactttgagaggccaaggtgggcaaatctcttgaggtcatgagttcaagactagcctggccaacatggtgaaaccctgtctcaactaaaaaaaaaaaaaaaaattaaataggcatggtggtgggcacctgtaatcccagctacttgggaagctgaggcaggagaagttgcagtgagtgagatcacaccactgtactccagccaggacaacagagcaagactccatctcaaatatatatagattgtaagaaaggaggaagaaaaatggaagaactcttctagatctaagaagactaaaaagcagggccatctcatctacagtggagaattagatgccacttgagaaacaatttctaatatactagatgcttggcaccaagtgaccaggcagttacagctgcccatcaccagctatattctgtcatacccaccaagtcatgaggtcaagtgtgcctagcaacaactcatgataagatgataatggatataccctgaagctacgtgatcagaaggtcaaaactccacatcatccatcactgttgtactaatggcattcctaagtgcacatctatagccatatgaccccatatgatcccgtaggaccagcttagagcggaggaaaaagcctgagcttggttcatggatatgaaggtctgtacatgtgtgtaggtaaaaaaaaggatgacagctacaatacagcttattcaaagagcatcttgaaaaacagtggtgagaaaaagtcctccccatgggaagaattttggatggtcatcttccttgtgtggaaaaagaagtggcttatgattagaatatatatgaactcataggtagtggcttgacagagtctgagaggtgagaagaaagatgggtagatcaggtacaaagaggactaggagtagaggcatgtgaatgaataaatggggtgggcacaaagtgtgaagatctttgatgcacatgttaactcccactagcaaggtactacataaccagatagagaaaaagactcagccagttgacagcatctggcctctaacactggccaccccagtgctggcataatggccacatgactgaaatggctatggtaacaaggatggagataattcataggcccaacagcatggtctcctacttatatagattgatctggatgctgccttggttgaatgtccaacctggcaagcaacagagaccagaggccaatgttgagcctccaagatgacactatctcacaagcagatccactggcacataaggtatcaagttgactgcattggacctacttctactgaaggagtacagatccattatgctgggaatcaatacttatttggatatgcatttgtttttcctgcatcactatctgaggacttacggagttcgaatccactgatacaggatcccacataacattgtatcagaccagataacccattttatagtaaaggaggtatgacaataggcccctgaccacaggaccaactgatcacattacctaccaaaccatccagaagctgccagctgatagaaccttgaaatggcctgttgaaagcataatcaaagcaccagctttgagatatgatcctctatgatgaagtatatactttaaatcaaacatcttcattgtctccccagtaggaacaatacatgggtctgggaatcaaggatttgaagcagcagtggccaagttattatctctccccttgactcacttggggacacttatgcttttgttccacatctgaaatctataaatagtttaaaaggccttgtttccaaaagggaaacacttccactaggggcacagcaagtcctattgaactataaactacagatggtgcctggcaactttgggctccttttgccaaggaaccagcaagcaaagatctcaccatcttagaaagggtcattgactctgatcatcaggagcaaatagggctgctgcctcctcagtactccttgatacaattttgattataaaaatcatagaaacatcagaaaggcatagaggcctttcagacccctcaaggatgaaggtctttgtcacaccaccagaagagccactgagaccaacagaagagccagccaaggatgaggagaatacgaaatggatggtggtggaggaagaagatgagtatcagttgcagttcgaaggccaactgcagcatcaggtgttgtagtttatctcactaaccttactctactgagtttcacccaagaaaagaggtctatcagaatcctggaggagctattctcagaaagcatacaaagcagtggatcaagcaaaaaaaaaaaagagtgtattgtcatgggtactgtactgtgccatccaattttcctttaaggactgaagggcaatgaattgagggaagtcacaggtaaacagtaaaaaattgaggctctcttccaatagcccaaagggaattgaatcatgccaacaaccactgagtgagcttggaagtgaatcctcctccacttgacccttcagataagactgcagccctggccaacccctgacattctgtagaaaatcaattgactataatgtgtgagtttatttttgaactgcctattctcttacattggtctatgtgtctgtatttttaccagctgatttgattactatagctttgtagtatattttgaagttagataatgtgatgactgtagctttgttcttttcattcaagatcgctttggctcttcaggggcctttgtagtttcatacaaattgttttttctatttctgtgaaaaatgtcattggaattttgatagggattgcactaaatctgtagatcactttgggtaacatggacattttaacaatattaattcttccaatctatgaacattaatattattccatttatttgtgtctttttaaattcctttcatcaatattttatatttttcagcatacaagtctttcgcctccttggctaaatttcttcctaagtatatttatatatttttgtagctatgtgaatgggagttttcttaatttgtttttcagacggtttgctattagtgtatagaaatgctatgatttttgtatgttaatttcatatcctggaaatttactgaatttgtttattagttccaacatatattttaaatttaaaaacaataaaatgaattatgaagcatttgcaacaaaaggtgggataatacaaaaatattctctcccctttttcagagccaatgcagtgactatgtgtgggcaagagaagacattctaaatgcttactgccctccttccatgtctagagctgttaggtaggataagagaggtctatttttaaactgacatgcaacaaattaaagaaaacaatggttctaaagctttgtgctttgagaggaggaaaccagagcagatggttttttgtttggcaaaaatccctaaatagggcttttggtttacaaaggggaaataccacaacctctcaaactccaccttcaacacacacacacacacacacacacacacacaacacacacacacacacacgcacacacacacacatacacagagtctgaaggaaagaattgaggaagaaaaagtaaaattttgttgttgttgttatttgtttgtttgtttgttttgagacagagtttcgctcttgtcgcccaggctaaagtgcaatggcgccatctcgactcactgcaacctccacctgccaggttcaagcgattctcctgcctcagccacccaagtagctggggctacaggcacctgccaccatgcccagctaattttttgtatttttctagagacggggtttcaccatgttggccaggctggtctcgacctcctgacctcagatgatccacttgccttggcctccaaaagtgctgggattacaggtgtgagccaccacacctgcccataaaattgttttttaaggttaagtaaagggaatttggagcttttgaatgaaagcctagaagggaggggagccactctggtttctgtaaaaggaggaggagcagagaagcatcttggagaaaagatctggtccacatcacacggaatcgggttaagttctgagaaagaggcatgggtggggaaatcctatggagaatgcagattgtggagaagtgatgggtagtacctagtgcagatggcagaggaagtaactccaggacttttgtaaaaacagggactaaagagttggagcagtagctggaagaaagatgtgaagtaacagggcttctttttttaatgggtgatattactgtatatctgtatgctgattgaagtgttccaatagaaaggaaaaaataaacatggataagcattaattagaggagtaaaatccttaagtaggagagagaaaatgggacctagcacataaagagagggtttgtccttagatgttcatccattgtaacctgacagaaggcagattctgtggttgccgatgctggtagaatgatggattcgggagtggaaagattaaaaaaaaatgatcttttgatcttttccattttctcagtgaaataaggagccaagttatcagctaagggtgaggagaaggaaggtggcttgagaaaggttgagaagtgaaatagccactttagagagtaagggagtgaacaaactagagaaatataataggattgtcgggcagagctggaggcccatgtaaagtttgtgtttatgaatttaaaatgggacctattggcatggttgtgagtttctctttttttccagccacgttcagttccttaggtgcaggcataaggaaggcagatggtgccagggatgagtttggccagcaaacactaccaaaggagagaagagcaagggagttgaatatatgcaaaggaacgacgtcaatgatgggtcatggaattgtagtggatacagaaaaaattttttggcactatgtaaacccagcatcaaggatgcaaattcagtcctattgacctggaagtccatgcttacttctgtatggcaatgcttctcaaacttgaggatgcgcaagaactatctggaaactttgtcataaatgcagaactctgggccattcttaacaattctggggcacaacacttgttctttgaaataagcagataggtaatagtaacggaaggagggggtctgtggcccattctatgaaaaatattgtattgcaggtgttttacgtgaaagtgcttgaaagtaggatttgtttgtttgtttgtttgtttgtttatttatttatttattgagatgcagtctcactctatcgcccaggctggaatgcagtggcaccatctcagctcactgcaacctccacctcccagattcaagcaattttcttacctcagtctcccgagtagctgggattacaggcccacatcaccatgcccagctaatttttgtatttttagtacagacagggtttcaccatgttgcccaggctgctctcgaactcctgacctcaggtgatccacctgcttctgcctcccaaagtgctgggattacaggcgtgagccaccgcacccagccgagatcagggttacgcacaggaaaagtgggacacccagacaattgtttatactgccaacttcacagccatagaatgatgacgttccaaatatttgcatttcttaaccaaatgacataactaaaagtaagctaccatgaagctaacactgcaatgggtgcggcaataaattcagtagctttatttttaaatttcaattaggttccttggatgaacaagaaacaagtgtgacattttgtgtggaatctgaaaaccaccttagcatggctttacatcggatgcatcagttttccaaaaagccagagaactgtgttctgttgggggagaaaaagataaacattctaagagaaacaatcatttcttaaatgtggtaaatagctaagccaaaccaaatacattttacgagtatatagaatacatgtgattatgtgaatgaaaccatttagtgtgaggtttaagtgatgggagaaaacattagggaaatgataagaccctcattttctttttctttttctttttcctttttttaagacagagtctcgccctgttgcccaggttggagtgcagtggcacaatctcagctcactgcaacctctacctcccaggttcaagtgattctcctgtctcagcctcccgagtagctgggactacaggcacgtgccaccatgcctggctaatctttgtatttttagtagagactgggtttcaccatgttggccaggctggcctcctgacctcaagtgatccgcccgccttggcctcccaaagtgctgggattacaagtgtgagccactgcgcctggccaagatcctcattttcaagagataaaattaaaggttctatatacagtgaagactgttctataacagtcaagattaaaggggaaaaaacagtatcggccctttacagtactgcatctgtccaaagaccataagggagaagatcctgaagaaatatatcaacaaagctaagacttttttcaattattcttttctcacattttttctactgatttttatttaagcttattgtattttgtcatgttttgtatttaacatctcaccagggctctgctgtcttttgaataatggcaatttattcagtgcatttgtaactatttacaattaaaattatattcctccatgtcatgcatatttctaataatcaaaccaaccccatgaggtgggtatttttaatcagttatcattcccttctctcccactagctggacacttctcagactcctctcttcttagctttgtctgctccctactgtcctctcccacctgctaaaacaagattgtcaatgtttttgaaagatttctaaacctagagccaaggacagcttcagcctctggctggttcttactttctggcatcagagacatttcaaccctaaatctgaaaccttaaaaggttagcagctctaaacgctggccattacacacttctttatctcacacaaacctggtatcattctccttaaaatattttgctctaatggatactttgctctaatggatacttttcaaactctacgaattgcttgagaaaggggaaatgttagatctttagaccaattatcattgccatgagttgttttgtcacttggggtgagttctctataatgtgggaccaagatgaggtagatattttattattcaatatttggttcattattattcaagctcaacttggaattatacaagatggcatcattcacctcagcattcattgaatataaccacaaccctgagttttacagaaaagacttagaaaagaggctgggcgcgtagctcatgcctgtaatcctggcactttgggagactgagacaggtggattgcttgagtccaagggttcaaaaccagccttggcaacatggcataatctcttctctaataaaaatataaaaaatagctggacatggtggtgcgtgcatgtaatctcagctactcagaaggctgaggtgaaagggtcacttgagcccagaaagtagaggctgcaatgagatgtgatcgcaacactgcacttcagcctgggtgacagtgagaccttgtctcaaaaaaaaaaaaaattggaaaggaaaatgcaagtggggacgccatctgcagctcactgcttcatatcattgtttctccctctcacccctctttttaaaaacccagtggccaaattcatctgtgttttgtttgtttttgttttgagacggagtttcgctctgttgcccaggctggagtgcaatggcgcgatctcggctcactgcaacctccacctcccaggttcaagtgatgctcctgcctcagcctcccaagtagctgcgattacaggcacccggcaccacagcaattaatttttgtatttttagtagagacagactttcacctttttggccaggctgctctcaaactcgtgacctcaggtgatccacccgcctcagcctcccaaagtgctgggattacaggcgtgacccaccgcacctggcctcatctggtttttgacaatcattatagaacaaaggctctgattatgatgacgggcaagtgggagtcctagctaaacgttccaatgcagacttacccttgaagcatttggggacttcgatagtgccatctatacactgagcatcctctgtatagctacacttcttttccttatttttgcagaagaaagaaactttatcaccatgtagcattccattcttaaatttttcctgaatctttactctctctccttggtacaccacagtggcttttttcacaggtactttacaagatgctgaaagagagaatacttgtaatcaggacttaagagttcaggaagtctttctgaaagagagtatagcatttgaaacagtagatgagtacacctacacaaattggtcaaggcaagaaaaatccaagaatatatatagtaagtaatggtaatatgattgctaattgcagttctctgtcaatagaaccattattcatagcttccaagatggccttctcttcccctacagtagccacagaaggtcagaacagaagcatcagagcctccatttcagtgaaaaaaaaaaaaaaaagcaactaacagatattgacatttcatgtaagcctactctgccctctcagattgcattcattaagcaggtgcatctatccaccagccattgtgagtgttggctgataacagctcataaatactctgaaaaattgccttcagccatagggaagccacctctcccaggagtttatgcaaaccacccccagggtcagggaagggagcagctcaaagccaaagactgactgatgagggaatataaaaagcaggtccccttggctcttagtgggattaactcaagggtggaattcacactccagagctcccagtgggatcaaactgaacctcattttagcagagaccacatttctccctggctcggcagcattagcatcaccagggaacctggcataaatgcaaattgtcaggccccatcccagatctaccaaatcagaaactctaagagtggagctcaaaaatcctgtgttaaaacaagccttccaggtgttgctgatccacagcgaagtttgagaaccggtgccttaccctcgcaaatctgcctcactctttcttctcctgagacattcactaaatcaactgtactcgaatccccgtctcaggctctgcttctagggaactgtaacctaagatgctagttatttgtcatcttgcctgctgccccagagttcctctttctgcttaaactgtccagcccatagtgacctgagcagagttctaatgctaggctgttgttgttctttacttatgcatgacactgatgggatcaagggtagacacctaactcaaaaggaaccagtgtctccaggaaagatgccagttggtgatgaatcctgtaactgagagggtctggtgtatatcaagccatgttcaagatgaataagcagagagacggaaatgggagagaccattgagatacggaaaaagtaggaatagttcctgcctttcagttccaatcttcaggagtatcagttgtatttcatgtcttcatcttcaatgcccacatgatcgacttgcctgttgcctccttataatatccccaatttccttgaactcactcgaatgtgtggttggtttttgcaatgagaagagccttggctagacagagcacaaaaaggggtgggcatggtggctcacatctgtaatcactcgaacctgggaggtgaaggttgcagggaactgagattctaccattacactccagctaggcaacagagtgagactccatctcaaaaaaaaaaaaaaagactccatgtgtctacaataatactaaaaaatgatggatggaagaaaagctcttctctacagaggccgaggcgggcggatcacctgaggtcaggagttcgaaattagcctggccaacgtggcaaagccccatctctattaaaaatacaaaaattagccaggtgtggtggtggggtgcctgtaatcccagctactcgggaggctgaggtaggagaattgcttgaacccgggaggcagaggtggcagtgagccgagatcacgccattgcactccagcctgggcgacagagcaagactccatctcaaaaaaaaaaaaaaagagtgctcagaggcaaagacttaaaagcaaataaagaaagcccacatgatctcccaccatatcaccaatgcttacaaaggatctgtttatttcatactgtttaaggtcaaggatacttcctaagcatgaggcttccccatgcacctgtgagtcctgaagtcacatgccagcagtttcctagcaagtctgagcaacaagtggaaaagtgttggaacaagaaaatagcaagtaaaggtgatccactgtatcaattcagagatcttacaggacctcgcctatatttccatacctttacaacttggcatggcagaccagtttcccagtttggtacattctatttcttccgggccatccagagaatatccatcatggcagccaaatgtggctttatccttgtaataaagtgttggttttgcaggatagttcacaaatccattgtctggtcttgatgggaatgggcattttacttctaaaacatttattcaataagacatattagtaataaatagtgctatccaatagtcatgaaatagttacatccttgtctctgtcacaccactgaatcactgtgtgttcctgtaactggaatgcaatttatagttaccttgtgcttaattctgtccccactcctcttatatctgtggtaccctggatattaaaaaagaaacaaccacactttgaaagtaaattaatgagacttcactaagttctctgggttttcacatataatcataaggtattatttattgcaaacttcatctctacacagtctaagatggtgggtttgaaagaagaaaagcaaagtctatttctaacaaaccataaaattaaaatgcaaagactgaacccccccccccattcacacttagtacaccattatttggctttaaaatagtaaatcttactgttattcaattcagactatggaagaagccagcaggaaatacgtcaaagaaaaatggtgctgcttcctggcctccttaagatcctcaacagtagaggcccaaacccacgtccttatgagctgcagtgcgagaaagcaaggctggagccaggagcacaatattctcagaggtagtttaaggaggtaattaagggtacaaactccagagtcagactgcttggctcaattttggttctaccacacattaaataaaacagaattcatgtggccaggcacagtggctcacttcggtcatcctggcactttgggaggctgaggtggatgctgaggaggtcagaagttcaagaccagcctggccaacatgacaaaaccccatctctactaacaaaaattagccgggtgtggtggcatgcacctgtaatcccagccactcaggaggctaaggcaggagaatcactcaaacccaggaggtgaagcttgcagtgagctgagattgcaccattatgctccagcctgggcaacagagtgagactccaactcaaaaaaaaaataagaatccatgtgtctataataatactaaaaaatggtggatggagggaaagctcttctctatagagggaagccagtgaataaatgtagaaggaaaagatagaattagaaagtcaccatttttcagcctccaatgtcataattgacagattcaaggatcatcattggattctaccatgactgcccaacagtggatattcacatggtttcaaagtatcacccacaggttgcttactattccaaagaaaaagcagtgcctttaccaaaaggtgatctagcacccctcaactgactaagtatcaaactaagcatggccagtgatggaacagctgacactatgtgcttcctgatatgacagaatgtattttttttttttgacacagagtctcactctgttgcccaggctggagtgcagtggtgcaatcttggctcactgcaacctccccctcctggttcaagcgattctcctgcctcaacctcctgagcagctgagactacaggcgcacgccaccacacccagctaatttttgtatttttagtagagacggggtttcaccatattggccaggctggtcttgaactcctgaccccatgatccacctgcctcggcctcccaaagtgcagaatgtattcttaacagtaatatttaacatgaatctaatcatgagtaaataaccaatcaagttcagattatggaacattctacaagacaactagcctgtactcttcaaaaatgtcaatgaaagacaacaaaagaggcaaggacttattcttaattataggagactaggctcacgcctgtaatcccagcagtttgggaggctgaggcaggcggatcattttagttcgggagtttgagaccagcctggccaacacagtgaaatcccatctctactaaaattataaaaattagctgggcgtggtggcaggtgcctatattcccagctacttgggaggctgaggcaggagaattgctcaaacctgggaggtagatgttgcagtgagccaaaattgcaccactgcactccagcctgggtgacagagtgagacaccatttcaaaataataataataattattattataggagactagagagacatgacaactaaattaaaggtgtgattcttgattagatcctgcataaaacaaaactcatgtataagagatacttctgggtcaattgggaaaatttgcatctgagataaatgttgcatgatatcgttgttgttatgttattagaatggtttggattattattgttaataatccaaaacatatgaagtgatgatataaaatgtccttgttcttagtatattcaggctgaaggctttatgggcaagtatcgtaatatatacaacttattttcagatgatgcaggaaataaaagggatctttctatggagaaacagagagaaaaatgttacaacatattaacagttgatacgtctaggtgaaattgaaaaaaaaaggaacctactttttaggacttgggagaatgaggtcagatgacacatatgtagcaggagaccagtgcctggcccatagttgagtgcccagaaaggtacaagttactactgttattggtagctcctccatgctgaaaatcacttatgttttgaatcgttcactggatatctgtaatatctaccactggagaagttaatagtcacgagaataactcttggccaggagcagtggcttacacctgtaagcccagcactttgagagactgaggcaggcagattacttgaggtcaggcatttcagaccagccagatgatcatggtgaaactccgtctctactaaaaatacaaaaattagccaagtatggtgacgggcacctgtaatcccggctacttgggaggccaaggcatgagaatcgcttgaacccaggtggcagtaagccaaaatcaccccactgcactccagcctgagtgacagagtgagactatctcaaaaaaaagaaaaaaacaaactatttgtgcacatgataaactttataatttgtctgtttgttatgcagctgacaaacttgaagatagtaatgacaggtcaagttagagacgaaataattttcataatttcttaaaaatcaaatatttctgtgattcttaaacttgggtaaagatttttaaaatgtgtaacaatcagacagcaacccagtcttaaccttcatctcctaggactctccaatttaacccaggaacttcacccagaagagaacttcaccagcctcgctgaaatgtccagctgtccatggatacatcctgcctttcatgtctcccccatgtgtggtatgccttctcctcattctctactgctcctccaagacccatttcaaaggtcaccacctatgggaagctgtcccaggcagctccagacagttaattgcattatttataattcccttgggtcagaagccaggtctcattcatcgggaatccacagtgcccagcacactgcctggcacatggtagatgctcaataaacagctgttgaatgagttcattggaaacactccatgatagtcagaattttcaatacctttcacaaatgggatcttgccctaccatgcgtattttgtctgatcattgcacttacccctgcattctggtaatttagtccaatttccatgtgtcgtgcaggtaattgtatcatttccaaacatcgcatgttgtggcaaacattcaaaaactgctgtgtcccgatagagggaattgtttccagctgatggcttataaacacgaagtgttgcaaacgtaggtatggatggtggagggcagatgatggctgggaaaataaagaactatcatttctatgaaaatagttaaggcttttaaatatactctttccagaaagaaaaaaaaaaccctaaggataaacttgagaaaatgcaaactgatcaaattagcagggtaaaaattgtcaattgtggatgcctaataggaaaatatgacctgccgggcacggtggctcacgcctgtaatcccaacactttgggaggctgaggtgggcagatcactagaagtcaggaatttcagaccagcctggtcaacatggtgaaaccccgtctctaccaaaaatacaaaaatgagccaggcatggaggtgtgtgtctgtggtcccagctactccagaggctgaggcaggagaatcgcttgaacctgggaggcggaggttgcagtgagccaaaatcgcaccactgcactccagcctgggcaacagagtgagtctgtctcagaaaagagaaagaaagaaggaaggaaataaataaataaataaataaagacagaaagaaagagagagagagaaagaaaggaaggaaggaaggaaggaaggaagtcagaagggagggagggagggaagaaaggaaggaaagaaagaaagaaaggaaagaaagaaagaggaggggaggggaggggagggagggaggaaggaaggaaggaaggaaggaaggaaggaaggaaggaaggaaggaagccctcaagtcagatgtccaaaccagtcaaaacaccaaaaaaatgaaggaaatttaagtcttgccactgccttttgcaacaacacaatggttaggttttataaaatcttttattcatatactaccttggaagatgcttctggaaggcagaatttgtccctcagtgctgagggaccatcctgaaataatggctggtgacagcaacttggtacatagtagtttgggaatgagttccattaccagttcagtctgtttctgctgaatacctccctgcttttggattcttggtatggatggagcttacccaagtagcttcaggaacccagagagatagtagtggcttgtcaccctgacctgagtactatggagcttcaacaagttatactagcataaaagaagatagtgctgaccaaaatgcgatttaccttgacttccctagatccctgctgctcaaaatgtggtccaggggctagcagcacgggcatagcctgggaaaatagcttgttggaaatgcagaagctcagaccccactgcaggtgcctgaatcagaatctacattttaacaaggtgcccaggagactcatatgtgcattcaagtatgagaaatactcatttaaattagattaaagctcaagcagtctttctatttacaacccttttggaaagtgagtttatggctaggcaccgtggttcacgcctgtaatcccagagccctgagaggctgaggcaggtaaggttgcttgaaaccaagagttcaagaccagtctgggcaacagagcaagaccctgtctccaccaaaatttttaaaaactagccagatctggtggcgctcatctatagtctcagctgctcaggagactgagaggatcacttggccccaggagatcgaagttacagtgagctgtgatcacgccactgcactccggcctgggcaacagagcaagaccctacctctaaataaagaagcaaatttacataatcggtataaatctgttttaagtgaaaactgtaggaaccatcgtgattcctactgctgagtgaaaattttacttaatttgtcctttaaaaactttcgtttttgcttgttcaggtcttcttaaacaattatttatttgaaattgctttactttccacttgctttttttttttttttttttttgagatggagtttcactcttgttgcccaggctggagtgcaatggtgcgatctcagctcactgcaacctccgcctcccgggttcaagtgattctcttgcctcagcctcccaattggctgggattagaggcatgcgccaccatgcccagctgattttatatttttagtagagacggagtttctccatgttggtcaggctggtctcgaactcctgacctcaggtgagccaccctcctcggactcccaaagtgctggcattacaggcgtgaaccactgcacctgccctcctcttgcttttgctaaagacagacttcactgacatgttgaagaactataattagtattgaaatgcctgggcctcctggtcaaagatgtataaatcacaagttggggaacataagaacgtccttccctacataagcaaagcccagagatgactctgacagcttggctgaggatcctctgaaaaaacaacagtgctttttggaggaatgccaatcagctcctaggatgcaagcccctttgatgggctgttggcttactgtgagggtgactttcctcctcgtctgtcccgtaagtcactaggcttactctctgaaggcaaagctgcctcctttggccttgcagcctcagtgctaacaagaggatccagcatacagtagatcctcaattcatgtttattgaataagttaataaatgaatgaatgaattccagagtgggaggaagatgtttgtttgatctcactgtttgcagaagttcctctagttaagtggtgacagtccctgatataccaatgccacacatatccaagccacttccaaagcactatgagagcattggagtcaacacacccagaaatgactggcttagatagagtaatgaccgcgaggtggagaatacagaatgtgtccgtgagtaaaatgcttcccttctgtcattccaaagtggttgtttcatcttctagagcaagataccaggatgaatatcccccacaagggtgaccattcatctcattgagctgtgactgaagagattccagatgtgagactttgagtgctaaaaccagaaaggttctgggcaaaccagctgatcaccttgcccacagacttacgagcacagacaggaagctccgggctccattttccttcctcagtgcacttggcagaatcagcgccattcagataaaacctgcaaaaggaaaattcattctatcaaggagtaaaataatccatcactgacatctcaaatatcttctccattgagcattgcttcatgttaatgctattgacttcttttccatcgtataatgctgtcttcctgacaaacttagtactcatctatggctcatggagcctcccaaccaatgatgcaggtgaatcactgcagggttccacagctggtgagtggagaatccaaacccttaaatccctcatctttaaagagttggccaagatgactgtttctaatataaagcaaagaaccatctctttttcaggatgacaaaagtgaaccaaactgagtaatcttcattattcattttcttacagcctactgacaccaatgaataaaagcaatgcagtctatttccaatgaaaatatagcattctgactgggtactttggctcatgcctgtaatcccagcactttgggaggccgagatgggcggatcacttgagcccaagagtttgagcctgggcaatgtggcaaaggcccaatttctacaaaaagtcaccaggccgtggtagtgtgtgcctatagtccaagctactcgagaggtagaggtggaaggaaggattcaaaaggatttaacctgggaggtcgaggctgcagtgagccatgattgtgccactgcactctagactgagcaacagaggaagatcctgtaaaaaaaaaaaaaaaaaaaaagaaaagaaaagaaggaaaggaaggaaaaagtaaggaaggagagagacagacaaagaaagaaagaaaagaaaagaaagacggaaggaagggagggagggaaagagaaagaaagaaagaaaaagaaagaaagaaagaagaaaggaagagaagggaagggaagggaagggaagggaagggaagggaagggaagggaagggaagggaaaggaaaggaaaggaaaggaaaggaaaggaaaggaaaggaaaggaaaggaaaggaaaggaaaggaaaggaaaggaaaggaaaggaaaggagcaggatgccatggtggctcacacctgtaatcccagcactttgggaggccaaggagggtggatcacaaggtcaggagtccaagaccagcctggccaagatggtgaaaccccatctctactaaaaatacaaaaattatctgggtgtggtggtaggcgcctgtaatcccagctacttgggaagctgaggcaggagaattgcttgaacccaggaggtggaggttgcagtgagccaagatcgcaccactgcactctagcctgggtgacagagcaaaaagaaaggaaaaaaaaaaaaagaaagaaaaatgtaacattatgtcttcgaagccaattttcttaaggtcatttgttaccagacccattggtagattggtgtttcagatgaaaggtgtgtatttctctctcacatgtagtattccttaacctccaatcccagtagaaacttaccctagtggatagccaatgtgctctcaataatgtcacaggggtgcctttgctccttatgagtctatgcccaccgttaagtgactgcctccctttgctcccagatgagcctgtgcccaccacaagtgattgcttcctggggatgtggaactgcattgcattctccactgtcacactcccaaccttctccatagaattctcttctagagactaccaggttggtcaatcaaattagcctaataactaaagcccaagtcttattcctaaagtattttaaccctatccaagatttggcccagagatcatatggaattatcatccaggttcaatcattttaatgtacctcctctgagataattaatcaggagcagaaaaattagatacagtggtgactacgtattgcactagttgttatattctccaatccttaccccaccctcaatgctacaagaccatcctggctaacacagtgaaaccccgtctctactaaaaacacaaaaaattagccgggcgtggtggcgggcgccagtagtcccagctactcaggaggctgaggcaggagaatggtgtgaacccaggaggtggagcttgcagtgagccgagactgcaccactgcgctccagcctgggcgacagagcgagactccgtctcaaaaaaaaaaaaaagcaggactaaaatcgatttgcatttgaaagtccaacctaaaggctgaaaacaaaatatagaccagtcttgatgtttagcttaaggatacaaaaatgtgctcagtctgttaactgcttagttccatgaaagttcttacccagtgttacaagaaaaactgatcgtgttgggatattcaaaagtcgtatagcgtacggctccattttctaagattccagcaaaaggacatactctggctgtgatacaaagataaaaaatgttacttttctttgggctaaaaaaaaacataaacaggtaaatttctatttatagaatttttcattaaatgaaacatataaattcattttcatcctttggttcaataactttactggtaactattctaagaaagcaattcaaaataagacaagtgatatatgtacaaaagcgttcattatactgtttctcctaataacagaatttggacaggcggggagcagtggctcacgcctgtaatcccagcactttgggaggcagaggagggtggatcacttgaggtcaggaatttgagaccagcctgaacatggtgaaaccccatctctactaaaaatacaaaaattagctgggcatgatggtgggtgcctgtagtcccagctactctggatgctgaggcaggagaatagcttgaacccaggaggcagagggtgccaagatggcaccactgcactgggcaatagagtgagactccgtctccaaaaaaaaaaaaaaaattggatagtctaagggttcatcaggggactgttttaattaatcatggtaaatcaaaagttgaactattatgtagccaataaaatatgaattgtgaaatatgtggagatacaatttttatgatatgctgatgaaaacagaaaaatacaaaattatacctgctctctgcagtaatgcaaaaagatatgcatggaaaataaaaaaatgaaatttttagtgttccagagttatagctgatttttattttatttatttatttatttttttttttgagacagagtctcactctgctgcccaggctggagtgcagtggcacaatctcagctcactacaacctctgcctcccaggtgattctcctgcctcagcctcctgagtagctgggactacaggcgcatgccagcatgcccggctaattttttttatttttagtagagacgaggtttcaccatgctggccaggctggtcttgaactcctgacctcaggcgatccacccaccttaggttcccaaagcgctgggattacaggtgtgagccaccgcacctggccctgatttaaagaaaaattttccctaatgatgttacattggctttttactaaaaattatgtttaggctctttaagcaaaaaagcatagtaaaatcaacttgcatgaacatgcataactttgacaaaggtcctgttcatataaccaaaatcaccagatccatacatctatttttactgcttaacttctacatataattaaatgtaccataaattcaatctggttgattgcataatacttgactgtaaagaataatgctagcatgatatcatagaaccatgttctaagaaataaataaaagcaaccatttacagtaaagccatagtgagattgatatattttacgttatattattattttaatttgacctcttttcttgtatttcattataatataatatatacataatgtagatgaaatttgtattcatttcagtaactattaagtccgctttcattttcaggtgaagtccaaagatatgatgattccccaaattttgtttttccaaatgtctctttggcatcagttgacatttcaaagcctctccactgttcttttaacttctgtagtgtttctttctccttttgccacaccagatctcatttttaaacctaccctagtttcaggctatgatcttctcctcttctatcaatagcacctattacccttactctctttgcacagagagaactccccaagaccttctcatttctctccaacctggctttctgcagcatctactggccctctgcactctgagcatgacgaggtagcttattcctccaaaatacccagaatccaaatgagggaagagaatgtgagagaaggtactgacttacgtgtacatttcagagtgttgatgggccacagtcctgtgagagggcagataaactttctcatccctcctcgggacacatagcccggcttgcaggaatacgtaatctcttctcctggctcatagaatgtttttaacgggaccactgtggaaaatggtaaatcatctggcttgggacaggctgaaagagggcacaaagcagatggttaacaaatctctatttgcattttaaagttcagctaagcccacaaatgaaaaatgtgtgtactgttaccaattataagcataccaagttgcatgccaaatacctcatatacactatctcatctaatcccctcaacaaccatttgaaggaggtattataattatccccattttacaggtcagtatgctgaggcttaaattggctacgtatcttacagaggagctttacacatggcaatattaaagaatcagtatcaatccagtccctccagcatccactctaaagagaatttagttatcagctgggcgcagttgctcacacctgtaatcccagcactttgggaggctgaggcgggtggatcacgaggtcaggagatagagaccaacctggctaacacggtgaaaccccgtctctactaaaaatacaaaaaattagccgggtgtggtggcgggcgcctgtggtcccagctactcgggaagctgaagcaggagaatggagtgaacccaggaggcggagcttgcagtgagccgagatcgcaccactgcacttcagcctggcgacagagcgagactctgtctcaaaaaaaaaaaaaaagaatttaattattcttcttcttattattattattgttgactgagttttgctcttgttgcccagactggagtgcaatggggggacctcggctcactgcaacctctgcctcccaggttcaagcaattctcctgcctcagcctcccgagtggctgggattacaggcgcctgccatcacgcccggctaatttttgtgtttttagtaaagacagggtttcactatgttgcccaggctgggctcgaattcctgacctcaactgattcgcccacctcggccatgatgcccagctaatttttgtatttttcataaagacggggtttcaccatgttggccagactggtctcgaactcctgacctcaggtgatccacctgccttggcctcccaaagtgctgagattacagatgtgagcaagcacgcccggcctacttatcattattgatccctgacatatacgaaggggttggatatattaattattttttcaaaagcaaaaagtacttactccgtcctgcaatagcaacatggcagagaaaactcgagaacaagatgagcactggagaaatcattgtggatgagtcacactggcactaccaaagtggttttcgtctgctaaaaagacagagccaaatatgaaagcgcttaaacattaaccattttctggtgtacttttatctttgtaaatagaagataaagtatcatgatttgaatggaactctgagacccacattctttaatcatttactttccacttatgtggctctgttatgaaatctttgggagatggtttctgtcttcataacgtttttgttaatggcacaaaacagttcattattgcttttgacagaaacttgttgtttccggggttgcctggacttctcattctccatcttttgttttgtgtatgttgtagatggaacaccaaaagatcgaagctcctgtttcactcacagccttggcatataaactttggacaaacacctactctctgttctcagtctccacctctctaaaatgatgttccagttttcagatgtataattacaaagaatgtcttccaggaggcacttacaactttaattccctacaaactgagctcaacatcctctcttgcaagctcctatagctccagttaggaccttagagctatccttgaattctctatcttctcttacgtcagatcaatacaaagtcctcctcatccattcttaatatgtcttggatctgtctagacaggtttctagatctgtttcaggaatttgaaaattgatttgaaattaacaacttgggactcgaagaagaaaaaaaaacttgagtaggataagataatgggccagtgctgatgttgttgcttgagagggttcggaaggggggttgtctttgattccctagttctcttctacatcatttgctctaaaaaaaaaaaaaaggatatataaatggacaatagccaggccatatgtgaaaacagaactctgacccacacatctgtagcaacaggtctagaaagccaaacctacaacctctatagcagttggcccaacttaaggccaaccagagaaatccaaacatatttctctaaccaatcacatggacacctcacttctagttagtttccttccatcctccccataccaacaatccgttggagcacacctgaagcctttccttttttctattataaagctttcccactcctctgtctgactttgactttgagtctctgccaaacacaactgttaatggctgcctcccttcctatagcaagctctgaataaataacctccgcttgctctcatttgggtgatcttggtttatatccagaggtctaaaattccctgagacacatcagcttgagaaatctccatctgtcaggcagatgattcttaaattacgatcctaatgaacattgtgttccatgataagaagagtgtgctgccactaatgtgaaataacagtggtccttccctatttgtccttctaaggggaaggagattcttgttctctggataattcccaggttccgctttattgtggagaatctccttgatgaatgaagaagaaagaaaactaatgaagtcaggaggagccaagtcgttctgtatagtaagatctgaagtagaaggggaaaaggagagagaaaccaaagaggtcgggcatcagttaaagaaaatttgagaaaaggttaaaattgagacgagaatattttcagcaacagctacaaactgagtgcctgatattgagagaggacaaggagaagggtttttaatgatgtttcctggtggctgggctcccttgcattaggaaacttggggtaggggtgtcgaaatagtttatattctattttaggtggttgttacttggctacatgcaattttcaaaagccatcaagccaaatatttaagatctgtgtgtttacttgattatacttcaattggaaaactatgcactcctttcctccttcttccctccctcccttcttccttccctccctcccttctccttccttccctcccttctcccctccctttttccctcccttcctccctccctcctttcttcccttccttccttccttcctccctcccttcctctctttctcctttcctcccttcctctcttcctcccttcctccttcttttcatcctaactcagtctaaaagtcacaaggaaggcctcaaggggaaagtcatgcttatctgtgtaaggatggcagcgtgatggtgtcacaagcttagctacatataggagattgagcaaacaagcaaatatattgaggataatgggggtcaggtttctcactaacaagagaagtaacaatgcggaaagaaggaaagttagcatgaaccttgaggtgttggattgaaaatggagacagtacaaattgtgcgtatatataaacagatacagaaatcaatatagatataatggtatgtacatgtgtgtgaatgtatgcctgaatatacatataattcttagttctgtccactaggataatagcagtagtacatccagtagcaatgagcacacacagtgcctaaatattggttgttaaatgcaattcttggccaggccgtggtggctaatgcctgtaatcccagcacttcaggaagaaagaaagatcgcttgaggtcaggagttcaagaccagcctagccaacagggtgaaaccctgtctttacaaaaactacaaaacctagccaggcatgatggcaggtgcctgtaatcccagctacttgggaggctgaggcaagataatcatttgaacccagaaggcaggggttgcagtgagccaatgagattgcaacactgcactccagcctaggcaacagagcgagacactatctaaataaataaataaatgcaatccaccatcgaaaggcaccaaagctccttagaaaattggctgattcttgaactgggtcaaggaaaagtacaagatgagcctggaacaccatcttgaacaacttaggtaatgctcagagaatgatagggacatgtccaaaggacagagaagccatttgaaagtggctttcttgactgggtgcggtggctcacgcctgtaatcccagcagttcaggaggccgaggtgggtggatcacttgaggtcaggagtttgagaccagcctggccaacatggtgaaatcccgtctctactaaaaatacaaaaattagcagggcatggtggcgtgtacctgttatgccagctaggaggctgaggcaggggaatcacctgaacccgggaggcagaggttgcagtgagccaagatcgtgacactgcactccagcctgggcgacagagtgagattccatctcaaaaaaaaaaaaaaaaaaaaaaaaaaaaaaaaagcggggggcggggggtgctttctctggtcaaatatgtgacagtttgtccaaataagtaataatagtaatggattatactccactgaataaaataggaatcagtgagtccacagtgatagtaataaacacattaacaattatgtgaagagataagaaagttattccttagagtataatgccaagcaattaatatagaggaatactggacttagagaattgtaatttggaaataattatgaaacgatttaattctggcaaagaagtatcaattgatgctagaatcaggggatacaagtaggatgagaaatgttcatacagccttaaacatgtctccacataaaataactatttattataaaggagacaaagagaaacttagaggggaagaacctggcagacaccatcttaattaagtaatcaaaattaatgtcaccactaatgggataaattggcatgtatgtcctccaccaagaggatgcaatgagaaggacacagcgtcacttctgtgatattcctgccaaaagcttagtaacctggattgtgtcatgagaaggcactgtacacacacaaattgaaggacgttatgcaaaatgactgccctgtcatcttcaaaagggcaaaagccatgaaaggcaaagaaagacttagggaacccaggtggacatgagaactgggtgcacagtgtgggcccgaaggggcatttggtgacacttgaatggaagggtctagggtctctgggtaaagagaacaaggaagtttttgttctattcttacaacttttctgtatgtttgtaatttgaaatcatttaaaaaataacgaaaaagaaaaagaagaaagaaagagagagaaagaaagaaggaaagaaggagagagagagcacaagaaagaaaaagaaagaaggaaggaaggggaaggaaggaaggaaggaagaaaagaaggaaggaaggaaggacgctttttgtggtttccttgaaagtccttctattgagatgtgatttttaaactggatcatacgaggcctcaaattttatttgcatcgccccctaaagaggaatacaagcttggcccccaccccaccgccatcattgacactcagctcctatttgccagctactgagctttgaaaaattatgcaaaataacagtgacaggaaaatggagaaaccactaaatcaaacttagtttgacggcttttgtgggctgttacatgcatttgtaattacaactttcatgtttactcttcggctggtaaaaatttcccttgtttgaacaattaaatacaaagataataaatggtaatctgcataattaataaattatgagtataattatgattaatttattcataatcataattttgggattatgatgattatcagctggccaccatgctcagctaatttttgtatttttagtagagccagagtttcgccatgttggccaggctggtctcgaactcttggactgaagtgatccgcctgcctcagcttcccaaagtgctgagattacaggtgtgagccattacctccggctgaacttgaacatgtctgagaactacagggtattcctggccgggcgcggtggctcacgcctgtaatcccagcactttgggaggccgaggcgggcggatcacgaggtcaggagatcgagaccacggtgaaaccccgtctctactaaaaatacaaaaaaaaagttagccgggcgtagtggcgggcgcctgtagtcccagccactcaggaggctgaggcaggagaacggcgtgaacccgggaggcggagcttgcagtgagccaagattgcgccactacactctagcctgggtgacagagcgagactccatctccaaaaaaaaaaaaaaaaaaaaagagagagaactacaaggtattcctaaaactcttccagaaacacacatggccctaatgaagaagtctttggagagataagatgcaattgcacctttcaattattttcaccttccagtttgtgacacattgggccacataactttagcaccatctggttgatcagttaactgatctatcttccctccacgcacttcgattcacattcccaaaactaacctatgataataactgaggagctggctgcttaccaatgttaaatgacagttttaaagacacatttaaacttaccattgaagttttatttggcagagcaagtggaaaaactgttaaaaaatatggaattttggcaaatcaagtggctgtcttgtattttcagggtttatactcatcagtaaagattggcaactcttgggtttaatgttacacttaacatgctattaatatattttaacaggccgggtatggtggctcacacctgtaatcccagcactttgggaggatgaggcaggtggatcacttgaggccaggagttcgagaccagcctggccaacatggtgaaaccccatctctactaaaaatacaaaaaagtagccgggtgtagtggcgggcgcctgtaatcccagctacttgggaagctaagacaggagaatcatttgaacccaggaggcagaggttgcagtgagctgagatcactcattgcactccagcctgggcaacaagagtgaaactccatctgaaaatatatatataatatatatgtatatataatatatataatatataaaatatacgtatatatatatacaagcatgatcaagaatacctgagaatttaagaatatataaaataacaacatttttatcacaagtaacatgggacctcgtcttttgaaactgttaatgactttatagcgtttcttacgctaatttgtaaattaaactatagagacctggattcagagtccaaggtttttgtattcctgaaaccacattgcatcacatgttcaaaaactttcttatttacttcccaagcagagactttgaccatgatattaaacatttagcaacagtttagattatttgtttaaaaacctactttcaatgttgtctccttctgagttggaattctagtcaatatctaccaaccacatttcagagaaaagattcaaatgccttctctttatgataaaatatgtcaggaactagatatgcatttataaggggtataaacatgtcacagggcttaatgggcatgattaaatatgtctagaaatcaataatgggcctaagtcagcactgggacatttttgtgtggacactgggatcctctgaatacaggtagcttttaccttgaaaaaactaatatccatatgttgcaatttctatttttatctagagtagttagtcttatccttggctgcatagtagatgttcccaattgtttgttaaaaataccaatactcataatttctgggtatagtgctttttttttttttttttttttttgagacggagtctcgctctgtcacccaggctggagtgcagtggcgcgatctctgctcactgcaggctccgcccctgggtttacgccattctccagcctcagcctcccgagtagctgagactacaggcgcccgccaccgcgcccggctaattttttgtatttttagtagagacggggtttcaccgtgttagccaagatggtctcgatctcctgacctcatgatccacccgccttggcctcccaaagtgctgggattacaggcgtgagccaccgcggccggccggtatagtgatttttaaaacaattgtccaggtaagtatgattgaagtaaggataaagatccactgatctagcacgtcaatgttcacctaagacaagttcagctaatacggttctaccacatacattttctcccttgccaagtgagactattttctgtactttgaatatgacacagctctgagtctcttgtgcattttctcctaagtgccattaatgcttttatttatttatttatttgggtgttttttgtttgtttgtttgtttttgacagtgtctcactctgtcacccaggttggagtgcagtggcgtgatcacaagtcattgcaccaccatgtctggctaattttttgtatttttggtagagacagcgttttgccatattgtccaggctggtctcgaactcctggcctcaagtcatctgcccacctctgcctcccgaagtgctgggattacaagcgtgagccaccacgcccagccttatttcttatttctttattttttgtagagatgggggtctccctatgttgcccaggctggtcataaactcctgatctcaagtgatctgcctgcctcagcctcccaaagtgctgggattacaagcatgagccaccgtgcccaggctttcttttttattttattttatttttttacaaactgctactaagcccttactaagctgtaatttgtggttgatagcagaatttcagaaataaacaagagttgactactggctataaggagttcgcagtttactaagactgaggtacaatgctacaattacaatcatagaagaaagtgtcagatgcatgtgtatccccgcacataaggatgtagtggcaatgatgaggatgttccaggttgttgccaaagagcaaaggcataaaacagcatcatgcacccaacagttgcaaattgttgagtgttgctggtgcagaatatttcaggtaaggaatagcagcaaacaaaggtggagagtgggtaggaactagatgataaaggctcttttgttttttttgtttgttttttgttttgttttgttttgttttgagacagtgtctcactctgttgcccaggctagaatgcagtggtgtgatcttggctcactgcaacctctgccttctgggttcaagcaattctcctgccttagcctcctgagtagctgggactacaggcatgccagcacacctggctaatttttgtatttttgtagagacagggtttcaccatgttggccaagctggtctcaaacttctgacctcaagtgatctgcctgccttggcctcccaaagtgctgggattacaggcatgagccaccatacccagccccaaaagtcacacagatattaaccagaaagtactcattctctaagccaggaatcgaacacgggccaccactgtgaaaggagagaaccttagctacggagctacaacactgggcctaatttttgtatttttagtagagacggggttttgccatcttggccaggctggtctcgaactcctggcctcaagtgatccacctgccttggcctcccaaagagctgggattacaagcatgagccaccgcacccagctggcaaaggctcttgtaagccacgtttaggaattagaacttatcttgaaggcggtgaaggggaggaaccggatcaggtttgtattttcgaaagtatatcgatagcagtgtagaagacacactgggatcagagagtagtgcagggagaaagagagactggaagaagaaaaaccgtagtatgttgccacataaactcatcttccattcattccactctccaaaccaatggcatcttctgtggtgttcatctgtgagatgaacaatatgaaactggccattctgatgaaccagaacatgtgctgctcttgtgaagcatacattagaaggaaggaatttccttccccttttccccgaaatcaaggcctgaaatgccagaggaacggagtcctagctaggggccaaagtctttacttagaaactggcaggaattttgctaggcaaattcaccaacccatatgttacgtgttagattggatttggagaaaggtgcttagatataattgtgatattgagtctgtggaggatggtgtgcaccaaatagaaaaaggagcatagtctctggctcttcatagagtgaccccatcagagaatgggggcaagttcatcactgtggcaagaccatggtgtcatggctaaggacagaggttttaatcaccgtatacttgagttggagtcctggctctgcctcttagtagctgtgtcatcttgggcaagtaacattctctagtcaagttttcatgtctaaaatggagataataaataaaacccccagccaggtgcaggtggctcatgcctgtcatcttggcactttgggagaccaacaggggtggctcacgaggtcaagagatggagaccatcctggccaacatggtgaaaccccatctctactaaaaatacaaaaattagttggacatggtggcacacacctgtagtttcagctactcaggaggttgaggcaggagaatcgtttgaacccaggaggcggaggttgcagtgagctgagattgcgccactgcactccagcctgacaacagagcaagactctgtctcaaaaaataaataataaataaataaacaaatcccccttcaaatgggtgtagtcaggattcaattagaatgcaggcaggatacttaactgtagctttattcataatggtgaaagtaagcaccaaaatatcccaaagcaaagaaatggttaaaatagagagcatctccaagatgtaagattatgtagtcattaaagaaaaaaaagcaatctttgaaaacacaaataatgatctgggaaattgcttatggcatgaaaataaaatacataattatatactgaatatggttccaattttgattatgacatatacaaatgctgaaagaaataaccctaagtggtgatattataatgagtgtttaatgaaagttagttctcattaacattcttcttgtcattaatatacatgcctctgatgtcttactccaaagaatttgaaattcctacacaaaatcacacaaaggtaggcatgtggttcatgcaggttaaatgagcgtcccataatgatactgcttacccggttttagtccccatgagtagcaaaattgtaagtctccccaacttatcttggtatagaaaataatatagatgtttctgcgacattcagtagggtcattatgtcacccaactctcagccaatgaccaccacaaattgcagccagtccctccagagtcagctgttcagctggctggatcatctcagccctctgtccagtcccagtgtgagagtctggtatcagccccccagctcacttcattttcctgcttcacaagaagttctgagttaggacaagtttgagacaaaaaggccatgatgctttggaatacaaagaagagaacactgaggccgggcatgggggctcacacctgtaatcccagcattttgggaggtcgaggcgggcagatcccatgaggtcaggagatggagaccagcctggccaacaaggtgaaactctgtctcaactaaaaatacaaaaactagctgggcatgatggtgcgcacctgtagtcctagctactcaggagactgaagcaggagaatcacttgaacctgggaggtggaggttgcagtgagctgagatcgcaccactacattccagcctgggtgacagagtgagactccatctcgaaagaaagaagaagagaacattgagacctttcacacaagtgtcacggactatttagaaaaacatattgtgagaattagaaagaaattatggggatgatctcatcaccagaaaacctaaaagggaatgaggtttaacagatgagagcttgataataagattctggaaatgcatttgctgacgatctggtgcagaagatgaggaggcagccagagaaactaatatgacttcccaggaagtttttctgatgagctcaggttgggaaagaaaaaaaaaggatggaggaaggggaatattacatgggatgaattcgaagtacagcatagaggccgggcacggtggctcatgcctgtaatcccagcactttgggaggccgaggcaggtggatcacatgagaccaggagttcgaaacaagcctggtcaacatgaagaaaccccgtctctactaaaaataaaaaaaaattagccaggcatggtggtgcacgtctgtaatcccagctactcaggaggctgaggcacgagaatcgcttgagcccaggaagtggaggttgcaatgagcagcaatagtgccattgcactctagcctaggtgacagagtaagactctgtctcaaaaaaaattaaaaaaaaaaaaacgaagtacagtataaaccaagtccataaaatgtcaggagctcagctgactaaactaaatccaagatgtgataaagatcagaaaaaatgcaaagacaataaagtgtagaagtcaggatggaaagaggaaggaagagttattgtatttcacaaggaagatgattcgtacatatggaattatacttttctcattatgagagtaatacagtatcatttaaatcaatctggaaaacaaacaggaaatgactaaaaatcctataatatcaccatttagggttatttcttttcagcatttgtatatgtcataatcagaattggaatcatattcggtatattgttgtatattttattttcatatcatgagcactttcccagattattatttgtgtcttcaaagcttgcttttttctttaatgtctacacaatcttacatcatgtagatgctctctattttgaccatttctttactttgggatatttgggtgctatctttcaccattatgaataaaggtacagttaagattctttttttttttaagtgaaagtaagtttattaggaaagtaaaggagtaaaagaatggcttccccataggcagagcaaccaagattcttttacaaattttttttcattgaaacagagtcttgctctgtcacccaggctggagtgcagatgcaatggtgctatcttattcactgcaacttccgcctcctgggttcaagctgttctcctgtctcagcctcccaagtaactgggattacaggtgcccaccacccatacctggctaattttttgtatttttacaaaagcagggtttcaccatgttggccagactggtctcggattcctggcctcaagtgatccgcccacgtcagcctcccaaagtgctgggattataggcataagccacctcactcggcccttttataaaatttttgaataaattgtttccttaggatagagtcctagatgtggaattacttaagcaaagggtaaaacatttaagaatcttcaaacatactgcctagttgccttcctgaaaggttagcccaatttttgttccgatttacaaggatgaagtttctaaacctaaggttgaaagctgacaaagagagagaccgattatttaattgttagttttcttctgacttattggtagagtttgaatatttgtgcccccaaatctcatgctgaagtgtaattcccagggttgaaggtgtgacctggtgagaggtgaatggattatgggcagatttctcaggaatggagtagcaccatttccttggcacgtgtgagttgagtcctcatgagatctggttgtttaagtgtgtggcacctcctcccagctccttctcttgctccctgctccctcttcaccttctaccatgaataaaatttcctggaggcctctccagaagcccagcaaatgctggctgtgtaaacagcctgcagaaccataagccaattaaaactgttttctctgtaaattttctagtctcagatatttcttcacagcaacccaagaacagactaaaacacctatatagcaaaaaaaaaaaaaaaaaagaaagaaagaaagaaattacactcacactgaaaaataaaaatgtatatcaggaagatggaataaaagtccagctagaaaataatacaagaaactagctgtccaaaatgaatttaggggctagaaacccaggaaaacatattccaagttgttaaaacgtgtaattgtgaccctgggaagttcactatcaacaatatttacaatataggatggtaaggaggacaatctaataaaatgaaaattgtattttaaaattcatgtacaattggctgggtgaggtggctcatgcctgtaatctcagacctttgggaggctgaggctgacagatcatttgagctcaagagtttgaaaccatcccgggcaacatagtgaaaccccatctctaccaaaaatacaaaaattagccacgcatggtggcacacgcttgtagtcctagctactcaggaggctgaggcaggaggatcacttgaactcagaggcagaggttgcagtcagctgagatcacacaactgcactccagcctgggcaacagagctaaaacctgtctcaattaaaaaaaatacatgtacaacactgtgatactgttaagaatatatacccacatacacaaacctgcacattctgcacatgtaccctggaacttaacataaagattttcttttttttgagatggggtctctctctctgttgccaggctggagtgcagtggtgcaatctcggctcactgcaacctcagcctctccagttcaagagattctcctgcctcagcctcccaagtagctgggactacaggtgtgtgccaccacacccagctaatttttgtatttttagtagagatggggtttcaccatgttggccagatggtctccatctcttgaccttgtgatccgctcaactcagcctcccaaagtgctgggattacaggcgtgagccaccatgcccggcctaaaaatttttttaaaaagaatatatctagaaaaaatgctggaagttagtgtaccaaaatattgagtatttgagttagaaggagatttttttttcttgttttctctgcttccaaattttatgtaatgtgtttgtattatttcatgatgggagaaaaaaacattttcaaaaacgatgaacacaaagatgcctgaagacacagaaggaaaagcaatagattctgacagccaagcctcagtaagtttgacataaatccacagcccaatggtatgaattgttaaacaaatggtttatgggtatgtagatgaatgtgaaatgatgactgaaaaataatatgaactctcttcaaaacatttgaaggtttcaacaaattaaatccaattatgttttttgacattgttattaggttagtagaaaagggcaacactttagctacaatgtatatccctcttttagtaaagcatttgatgagttatctactggcatccttgggagtaagataccgaactgtggcttgggatatggtacttctaagtgatttgacagctgcttgtacaaactgtatatgaaaagttctgctcaatagctataacatgaaacacccaaactccacagaggtttattagctgccataggtctagattatatgaaagtaaaatgaggacttggggaatgattcattattttttaagagagtagaggcatgaatgtctcccacaaatatcatctattgctttttgttttaagcttaaatctttttttttttttttttttcagatggagtcttgctctgtcgcccaggctggagtgcagtgacacgatctcagctcactgcaaacctccgcctcccagattaaagcaattctcctacctcagcctcctgagtagctgggattacaggcatgccctaccacacctggctaatttttgtatttttagtagagatggggtttcaccatgttggtcaggctggtctcaaactcctgaccttgtgatccacccacctcggcctcccaaagttctgggattacaggtgtgagccactgcgcccggccttaagcttaaatctttatatatatttatttatatttatttttgaaacagggtctcactctgtcacccaggctagaatacagtgggatgatctccactctctgtatcttcaacttcccaaactcaagtgatcctcagcctctcaagtagctgggactacaggtgtaagtcaccacacccaactaattttgggttttgttttgttttcttttgttttttggtagaaactgcgttttgccatgttgcccaggctggtcttgaactcctggcctcaagcaatctgccggcctcagcctcccaaagtgctgagattacaggcttgagccaccccacctggcctaaatctttaagtttaaagtgagtatgaacacccaccgatgttgattcatactggcctcttcgagaggaccatggatcttaagaagcagtcttatgatattgtgaaagtaaaatatcttcagcccccaaaatcactaaggaaacctcaagctggaaactgcttagggcaaacttgccccccattctattcaaagtcacccctctgctcactgagatagatgcatatctgattgcctcctttggaaaaactaatcagaaactcaaaagaatgtaacttctctgctttgagtcttcctgcctttgcttcaagttgtcccgcctttccagaccgaaccaatgtacttcttacataaagcaattaatgtctcatgtctccctaaaatgtataaagccaggctgtgccccgaccaccttgggcgcatgtcgtcaggacttcctgaggctgtgtcacgggcgcaggcacatcctcaaccttggcaaaataaactttctaaattaactgagacctgcctcagattttctgggttcacaatgtctggatatgtgaacaagcaaaaatacgtcaaggagcttgacagatgactgcccttgtctcctagatcaaaggaaattcaacttattatttaacctgtcaagaatatctgtgctttcccctttgtttctatgtgttctctcattaattttcttcaccatggcatgtccccttcatctactggctctgtttgaaaaccttcacttttgtctgtctgccaatatcccacagctaaggaacctcacactacatacacacaaatatactcctctaccccccagttcattattttaaaagctgacagttaagaaaaaatttcaggccaggcacactggctcacgcctgtaatcccagcactttgggaggccgaggtggggggatcacctgaggtcaggagtttgagaccagcctgcccaacatggtgaaatcctgtttctactaaaaatacaaaaattagcccggtatggtggtgggcacctataatcccagctactcgggaggctgaggcaggagaattgcttgaacctgggaggcagaggttgcagtgagcagagattgcgccactgcattccagcctgggcaacagagcaagactccatcttggaaaagaaaacgaagaagaaaaaatttcaagaataagacaataggctggatgcagcagctcacacctgtaatcccagcactttgggaggccgaggcaggcggatcacctgaggtcaggagttcaagaccagcctggccaacattatgaaaccccatctctcctaaaaatacaaaaaattaactgagtgtagtggcgcatgcctgtaatgccagctacttaggaggccgaggcataagaatctcttgaacctgaaaggtggaggttgcagtgagctaagatcacaccactgcacgctagcctggacaacagagtgagactgtgtaaaaaaaaaaacaagactatagaattatttccacagtcctattctgttcaatatcttcaacaaattggataaagaataaaaacaagagccaggcgtggtggttcatgcctgtaatcccaggactttgggaggccaaggtgggtggatcacgaggtcaggagttcaagaccagcctggccaagacggtgaaaccctgcctctactaaaactacaaaaattagctgggcgtggtggtaggcacctgtaatcccagctattcgggaggctgaggcagagaattgcttgaacctgggaggcagaggttgcagtgagccaagatggcgccattgcactccagcctaggtgacagagcaggactccatctcaaaaaaaaaaaaaaaaagtataagaacaaaactacaaattttcagatgttacgcaactgagagaacgcagagagagttgatctcaaaaaccttaccacttcagccggaaaccacaggatacatttcacaagatcactgcaaatctcagcatgcaggtgaagtggaggaggaagcagcatgagcttgaagaagttccagatgtttccatcaaccacaagtttagcctgacctgctagtgacacagctgaagtgtaattgaattaggctgtgttcagacacagaaaactccagtcttgaacacaattactgctttgcactgtgttggtcagaccaaagtttggcagttcttcaggagcatactgaaaagccagacctctctgaaggacaatgaaaactctgaaagtcatgtaacaggataataagtcaaagtatcatgaaagcctaccctggagaagactaagaaagtctccaaatatttcaaaaaccattatgtggaaggagttttaaacttgttttcagtggattctgagcacagactttgggttaatgggtaccagttttagagaagaaagaaagattcaatgtgtgaaaaaatggatttttttctttttcttttttttttcgagacagggtctcactttgtcctccaggctggagtacagtggcacaatctcagttcactgcagcctcgacttctggggttcaaacgatcctcctgcctcagcccccaccccaagtagttgggactataggtgcttgccaccacgcctggctaatttttgtatttttttgtaaagacggatttcaccatgttgcccaggctgatcttgaacttctgagctcaagtaatctgcctgtctcggccttccaaagtgctgggattacaggtgtgagccacggcgcctgccctaatgtttaataattaaagactttcagcaatgaagtgggtttcttcaaaaagtgatgtgcatcctgtcaatcataacatcaagttctaggccctggaagttcaactgagtgatcatcctaaaataacatattgggtcactcttctgcttagatgctccatggcttcacattaaaattagaacaaaggccaggcatggtggcccacgcctgtaatcccaacactttgggaggccaaggcaggcagatcacgaagtcaggagatcgagaccatcctggctaacatggtgaaaccccgtctctactaaaaaaaatacaaaaaattagctgtgcgtggtggtaagcgcctgtagtcccagctgctcaggaggctgaggcaagagaatggtgtgaacctgggaggcggagcttgcagtgagccgagatcacgccattgcaccccagcctgggcgacagagtgagactctgtctccaaaaaaaaaaaaaaaaaaaaattagaacaaaatgcaaactccccatcctggtctactaggccctgtgtgatctggctctgctgacctgtatcagcagctttctcccttttcctacttttcatccaagtattcatttactccaggactgttcttcaaggtcagccatgtgctggcacagttgtgaacacagcaggcaaaatctctaccctgaagttgctgacatcatagtgggagaagaaagacaaaaataaataaataataaacaaatagatgaagggttaaggtaagtgctatgtagaaaaatgagcagggcaggccaggcgcgatggctcacacctgtcatcctagcactttaggaggctgaggctgaggctgatggaccacttgagctcaggagttcaagactagcctgggcaacatggcaaaaccccgtctctataaaaaatacaaaaattagctgggtgtggtggcaggtcacggttctcctgtccagctcactgcccctggaccactccatgtagaagtcctcaataaaccctatgtctcgctcactggctctgggtctctttttcagcctctcagacatggtgccatccttattatggccaataaatgtcccacacaacacatgcctctcaagggctgactctgtctttactggctgcatccccagcacgtagaccagtgcctgacacagtcagtgctccagaaatagctattaactgactgataagggaagcaatgagggaagtaatgtcgttgctcagagccatttccctggcaacacttgccaactggaagttcacttccgctaataaaattctctttggaaaatacagatacagcctgggcaacatggcaaacctccatctccacgaaaaaactgcaaaagaaaaaaattagccaggcatgatggcatgcacctgtggtcccaactaaccaggaggctgaggtgagagaatggcatgatcccagttcaaggatgcagtgagctgtgatagtgccaccatactccagcctgggtgacagagcaagaccctaccttaaaaaaaaaaaaggccaggtgtagtggctcatgcctgtaatcccagcactttgggaggctgaggcaggtggatcacaagatcaagagtccaagaccagcctggccaagatggtaaaaccccatctctactaaaaatacaaaaattagctgggtgtggtggtggacgccggtaatcccagctactcgggaggctgagggaggctgaggcaggagaatcagcttgaaaccgggaggcagaggttgcagtgagcagagatcatgccactgcactccagcctgggcaaaagagtaagactccgtctcaaaaaaaaaaaaagaaagaaagaaaaaaagaaaatacaaatataaatatgtcctggaaaagttaagcctcattcatattgtaatatgaatgaactaatttaatcagatgacctacatatagcagatagagtagcattcaaaaggtaagcattttggttgaaacagaagggattttttttttttttttttttttttttttttttgcagaatcttgctctgtcgcccaggctggagggcagtggcgcgatctctgctcactgcaacctccaattcctggttcaagcaattctcctgcctcagcctctcgagtagctgggattacaggcacacgccaccacgcccagctaacttttgtatttttagtagagatagggtttcaccatgttggccgggatggtctcaatctcctgactttgtgatctgcctgcctccgcctcccaaagtgctgggattacaggtgtgagccaccgtgcctggccgggatatctttttatttttttgagatggagtcttgctcttgtcacccaggctgaagtgcagtggcgcaatctctgctcactgcaacctccaattcctggttcaagcaattctcctgcctcagcctcccgagtagctggaattacaggtcaactgatccgcctgcctcagcctcccaaagtgctgggattacaagcacaagccaccgcacctggcccaggaggaataccttgaagggagttctaggcctcagtgaagctggaacaaaagagtcaaagtatggaaggagagccagtgtggtggcccaaagagagagagggcagaactggaaaagatttagaaaaggtgactgataggtctcaggacacaccacccccaaatatgactgcaggagaccagaatatgctaccccaaaatatgtctcttttatgtatgggttatttcgagctggttattttgagaaactgcagacacaggagtatttcagaaaagtcgcccttttgtaaggaaatttacatctataaagaaaatcactagaaactcctaaaggatggagaaggcctggacttaactctgcataacaaacctgacccttggccaggagcagtggtggctcacgcctgtactcccagcactttgggaggccaaggcgggtggatcacctgaggtcaggggttcaggaccagcctggccaacatggtgaaaccctgtctctactaagaatacaaaaattagcctggtgctgtggcgcatccttgtaatcccagctactcggaaagctgaggcaagagaatcccttgaacccaggaggcggagcttgcagtgagccaagatcccgccattgcactccagcctgggcgacagagtgagactccatctcaaaaaaacaaaacaaaacaacaaaactgacccttgcttttcagtgctttttctggccatcttgaaagactgtggggtctttccccacacctttctttctttgtttaataaaaagggcagcatttaaacctgaagattaaacttttccttggagatctactctggaggtttatgcatttctccacggttttcttccatgcgtacatgaggtatacacgctaataaacttttgtttgtttttctcttgttaatctgctcagggagtcccagttaagaactatggagggtagaaagaaaattatttttcttcccctacataaccaaagttaatcttgtcatcttatcacatctcttgaggccccagcagcagctgcttgcaaagcctcagttaaaagataagattgccactgaatagtgtttcttaacctttctcaaagtcatttttcaaaataagccaatgcagtttattatttactgcttgtcttcagctagtagcaagatagagcttcatgtggctgtaaatgggggaagaaattactataactcctgaccctccttttcttccacacgtagatgttagtccctgagatgtatttatcaaaatcagcatgataaatataaaaatctcagctaggcatggtggctcacgcctgtaatcctagcactttgggaggccgaggcaggtggctcacttgaggccaggagttcgagaccagcctggccaacatgacaaaacccagtctctactaaaaagtacaaaaaattacccaggcatggtggcacatgcctgtaatcccagctacttaggaggctgaggcatgagaatcacttgaacccaggaggtggaggtggtagtgagctgagattgtgccactgcactccggcctgggcgacagagtgagattgtctcaaaaaaaaaaaaaaatcttatgccctcatttcatgttatttgaacaaaagaccatggctaacactagatcacagcaatggacataagagaaaaattttttgtcttgaattttacgtatttaacatttgggccatatagtagtgtgaattgtctatttctatttacatgacctaaatcagtcaatagactgtgatctgcatcagccaactggaactcagcaagtgttgaccaatcagaactacataaatttgcatccttcatttgcataagcagaccagagtgggaacctgggagggaactttctctataaaagataacttctctctttattctctcagaatgcacctttgttttgtaccaaagactgcatctccctggtttacaaactgtttactgggatgaattctcttttttttctttaaaaaatatatttttcagtgaatttgttggtaatagtcatgacaatctagaactacagcaggacactagtttttaaaagttatttgaactttttaacatgtgttaggcaatactgatgaaacatctctatctatagagatgtattaaagttctggccgggtgttgtggctcatacctgtaatctcagcactttgggagtctgagtcaggtggatcacctgaggtcaggagttcgagaccagtctggccaacatggtgaaaccccacctttactaaacctacaaaaattagctgggcatggtggcaggcacctgtaacctcagatatgtgggacgctgaggcaggagaatcgcttgaacccgggaggcggaggttgcaatgagctgagatcatgccattgcactccagcctggacaacaagagtgaaactctgtaaaagacaaacacacacacacacacaatgttgtacaatttatttagtctataaaaccaaaatgaggcttcaagtcagcttagttcattgtcatccaagcatacatattagggtttggtaatacaagcacatgttaaaaagtatttctaggctgggtgcgatggctcatgcctgtaatcccagcactttgggaggctgaggcaggtggatcacctgaagtcacaggtttgagaccagcctggccaacacgatgaaaccccatctctactaagaatacaaaaaaattagccgggtgtggtggcaggagcctgtaatcccagctacttgggaggctgatgcagaagaatcacttgaacccaagagacggagattgcagtgagtagaggtcatgccactgcactccagactgggaaacaagagtgagactctgtctcaaaaaagaaaaaaagaaaaaagaaaagtatttctacagtacaatatgtaaatagtgagagagaagttaccttctcactggtgatcaccttggttcttgccctcaaagtcaatcacggttgccactcttttttttttttttttgagacggagtctcgctctgtcacccaggctggagtgcagtggcacaatctcggctcactgcaagctccgcctcctgggttcacgccattctccggcctcagcctcccgagtagctgggactacaggcacccgccaccacgcctggctaatttttttgtatttttagtagagaggggtttcaccttgttagccaggatggtctcgatctcctgacctcatgatccgcccacctcagcctcccaaagtgctgggatgacaggtgtgagccaccacacccggccaaccactttcttgagtatccttggtaaaccaaaaagtatctgagtcaaatctcaacaaatttagaaagtttatttttgccaaggttaaggatgcaactgacacagcctcagaggtcctgatgacatgtgcccaaggtggtcagcaggggatggggttgggggtgcagcttgcttttatacattttagggagacacaatacatcaatcaatacatgtaagattaacattggtttgatctggaagggtgggacaagttgaagcagtggcagattagggggtgcttccaggtcataggtagatttaattatactgtgattaagataagggattgtgaagccgggcatgatggctcgtgcctgtaatcccaacaccttgggaggccgaggcaggtggatcacctgagatcaggagttcaagaccaacatggccaacatggcaaaaccctgtctctactaaaagatacaaaaattagccaggcatggtgatgggcgcctgtaatcccagctacttcagaggctgaggcagcagaatcgcttgaacccaggaggcggaggttgcagtaagccgagattgcgccactacactccagcctgggtgacagagcaagattacgtctcaaaaagaaaaaaaagataaagggttgtggagaccaaagttttatcctgcagatgaagcctccaagtagcagtaacaggcttcagtgagactagattgtaaatgtttcatatcagacttaaaagtctgcattgatgttaatgctggaggggtataatgaggcatatctgacccccacttccccatcatggcctgaacaagtctttcaggctaaattttaggtgtcctggccaaggaggaagtccattcctatggttgtggggaggccttcaaaattttatttttgattaaaccttctagaaatatcctatgcattatgaacatttttatacaaatttcagcatattacacatgttgttactttttttctctctctctctttgagatagtcttgctctgttgccgaggctggagtgcagtggcatgatcttgactcactgaaacctctgcctcctgggttcaagtgattctcctgcatcaacctccagggtagttgagactacaggcgcatgcaccatgactggctaatttttgtatttctggtggagacggggttttgccatgttggtgccaagccggtctcgaactcctgacctcagattattcgccccccttggcctcccaaagtgctggaactacaggtgtgagccaccacaccctaccgatacacattgttcttgatcatgtttatttcacttaacaatgttttggtgccaggtgtggtggctcatgcctgtaatcccagcactttgggaggctgaggcgggcagatcacctgaagtcaggagttcgagaccagcctagccaacatggcgaaactctgtctctaccaaaaatacaaaaattacccgggtgtggtggcatgcatctgtagtcccagctacttgggaggctgagccaggagaatcacttgaaccagggtggcggaggatgcagtgagccaagatcacaccagtgcactccagcctgggtgacagagtgagactctatctaaaacaaaacaaaacaaaacaaaacaaaatatatatatatacacatatatatgtgtgtgtgtgtgtgtgtgtgtgtgtgtgtgtgtgtgtcttggtgatcatttcatatctgtaaatatagatttgacttttttttcaaacaacaacatgctatactatatccattgtaggaatatgtcacaatttatttaactggtaccctactcatggatgtttagcttgtttccaatcttctgctattaccaacagtactgctaggaatatttttatatacatttctttgtgcacatgtataaatatatccaaaagatgaattcataaaagtgaaattggtactccaagggtatgtatatttttcttcttaatatatattctcaaattatctcctattggaatttggcagagattctggaattgcttttcatcgaggttgtaacacccaccaccaacataggcaacactggctatttatctcataatgcctctgtggatgtttccttcaaagaacaccagatggcagaacagaccctaatacgtttgccttgggtaacagggaacttccggacttgaagcctcattttggttatgtagactgaacaaataaagttgtagaaccagttgtacattaataaatctctatagatagaaatgtatcaattcctcagtaatatcatcagtaatagcagatggtagcctttgccttttttcctgtctacctgaaaaaaacactaaaaagatcctcatctttcgctctgtaattcttccccattacacaaacattactttttctccagctgaataatatagagaacgtgcgttagcaataataattcatggagtttcatttatgtgtgaaagtgacttatttagttcatgttgttacaacaaggaaatgtatgagcatatgtatgtcacataagaatatgtctttaagcaaatagaaatgaataattaaagttgatgcctttactataaggctttcatttgtcagaacaccagcaaaccaatttcacagcaggaaaacattttttttttctttcctggagagtatgtcatctgagcagaacaaattcaattagcgttgtacctgctttgcaacttatgagaatgcttttatgcctctgggtagctgctctcaacccacagcccacagcccacatatacccaatagagaaggtactcatgaacttgtatatgctcttccgtaaaactcttttcagtcttcaggatgtagtactttttaaattaatccttcattgccccagaagataaaccggtgggaagttaatgaaattggcgtcctaagctacctgctcaggatcaaaatttgctacctactacagatcttattattgtccttcttgagaaatgacagatgtcttattttaaaggttctaagataagatgtacataattttaggggcagtatcatctagtcgctgtagttccttggaacactacaagtccttaagctaaacaggaagagactctgccacaaagaaggcaacattgagattaatgaagatttattggctaggcgcggtggctcacgcctgtaatcccagcatttttggaggccaaggtgtgtggatcacttgagaccaggagtttgagaccagcctggccaacgtgacttaatcccgtctctactaaaaacacacacaaaattagccgggcatggtggcaggcacctgtaatcccagctactccggaggctgaggcaggaggattgcttgaacctgggaggcagtggttgcagtgaaccaagatcatgccacttcactccagcctgagtgacaaagcgagactccatctaaaaaaaaaaagaaaaagaaaaaaaaaagatttattaagtactagatctttcccaactgccatatcacgttacaacattttatcaggcaaaagttatcgtgcccctgtttcagattaggaaactgtggctcagaaaagttaaataacttgcccaaattaacacaactgccaaggggccaagcaggaatttggatgcaagtatatctacctcctagactgatggttctcgatgtatggcccccagaccagcagcatcaccatcactagtataacctggaaattttttatgaaacatttttcaggacccaacctgctcctcctaaagtagacattctggggttgtggcccagcaatctatatctatctatctatctatctatctatctatctatctatctatctatatctatatatagatatagatatagatatattttttgagatggagtcttgctctgtcaccaggctggagtgcagtgactcgatctcggctcactgcaacctctgcctgctgggttcaagagattctcctgcctcagcctcccaagtagctgggactacaggcatgcgccaccatgcccagctaatttttgtatttttagtagcgacggggtttcaccatgttggccaggatggtctcgatctcttgagctcgtgatccgccagcctcggcctcccaaagtgctgggattacaggcatgagccaccacacccagctcagcaatctatattttaacaagtcctctaggagattctgatgcaagttcaagtttgagaactattgtcctagacacattctgccacaatatcctgatacatgggagggatgcatgagagaggaaactagtgttcctcgagtcaccatcacgagccaaacactgtcatgagtgttttacatcctattccctttaatcctcacaatagccatgcaagttaggtgttctgttttgttttgtttattatttatttatttatttatctagagacagagtctcactctgtcacccaggctggagtatagtggtgtgatcttggctcaccacaacttctgcctcccgggtttaagcgattgttgtgtctcagcctccccagtagctgggattacagatgtgcaccaccacgtctgtcatgtttgtatttttagtagagatgggggtttcgcctagttggccaggctggtctcgaactcctggcctcaggtgatccacctgcctcggccaaaagatgctaggattataggcatgacctactgtgcccagccttgttttttaaattttacattaaggaaactgaaggtacaccgaggaaactgaggatgataaggtcatttgttgaagctcccaataccaataagaggcactttacacttgggcctatctgattccacagtgtaaacttcatgccaaatccactggtaagttctatccttctatcctaacagtcatattggttggctaagcgtttgtcttaagggtattcttcacacacaattgtaattagcctgattgtgcagttttccagccaaaatctagatgaatgattataaatgagagggatgctgctagaaatacattaaagagagacaaaagtgacaacatgccaggcgaatagtctagaaggagatagtaaaaactacacaaaaaaatgcataacttaaaaaaaacttaagaccgtatcactttgtaattaaaaaagcaataaagattagttataaaagttgagggtctgaggctgttttgtgtatgggtctacacttcaacaattcctgagcttgtaactagaataaagaatatcgtaatgatgattacaaaatccatggaaaatagattgaattttccatattaaagtgtgtgaagtgcatttcaaaaagatctgcatgagaaatggttaaaatgagaaatgtgttgactcaagacacaagctataggttacctgtgcaactgatccatctggaatattacattcatcagggctgctattgcctgaaaccaatttggactcggactgctgaaccttcctgatatggctgaatgtttgtgtgcctccaaaatgcatgtcaaggcccggtgaggtggctcatgcttgtaatcccagcactttgggaggctgaggcgggcggatcacctgaggtcaggtgtctgagaccagactggccaacatggtgaaaccccgtctctactaaaaatacaaaaattagtcggtcatggtggcgggtaccaataatcccagctgctcaggaggctgaggcaggagaagtacttgaaccccggaggtggaggttgcagtgagccaagactgcgccactgcgttccagcctgggtgacagaccaaggctctgtctcaaaaaaaaaaaaaaaaaggcataggtcaggcgcagttgttcacgcctgtaatcccagcactttaggaggctgaggcaggtggatcacctgaggtcaggagttctagaccagcctggccaacatggtgaaaccccatctctactaaaaatacaaaaaaattagctggcagttgcctgtaatcccagctactcgggtggctgaagcaggagaatcacttgaacctgggaggtagaagttgcagagagcagagatcgcgcctctgcactcaagcctgggtgacagagtgaggatctgtctcaaaaaaaaaaaaaaaaaaggcatgtcaaaacttaatccccaattcaacagtattaagaggcaggacctttatgaagtgatgaatgcccttataaaagggtttgaggaagaaagttcagccagtattagcctttctgccatgaaaggatgtagtaagaattcatgccttctgccacgtgaggattcagtgacaagactccatgttggaatcagagaccagccgtcaccagacactgaatctgcaggtgccttgatcttgaacttcccagcctccagaactgtgaaaaatgaattcctgctgtttataaatgaacctattcaaggtatttgtgttatagcagcaggaacagaccaagacacttctttttgtcccatctttattgtgtgtgtgtgttttttgttttgttttgtgatggagttttgctgtgtcgcccaggctggagtgcagtggcagtgatctcggctcactgcaacctccacctcccaggttcaagagattctcctgcctcagcctcctgagtagctagatctacaggcgtgtgccaccacacctagccactttttgtatttttagtagagatgggatttttgccatgctggccgggctggtctcgaactcctgacctcaggtggtctgccctcctcagcttcccaaagtgctgggattacaggcatgagccactgcacctggcctctcttttttattggtaaaaggacctcttgtttcatgcagccctagagcttgctctcctaaactcaaaggtgggaaacagagactgaggtcctgacttggatccaattacatggaaaaggtctgaagctcaggtttaactgaagactcctgaaataaaagataagaatcctggaggagctgacccatctttcatccttctgatacaataaaaaaggccccatgagactgctgtagaagagacttcaaatgccttctaagccattgtggctactgtgggattggtcacatattagagaagattttttttgtttgtttgcaacatttctaaccaggattttttttttctcactgagttataccaggctttgatagttagttacaaataaaaaatgagttagcctactattagagtcttgaatgtccaggagaaataagactaagactaagagttgtacagacaattctcttgaattggcaaaaaaaaaaaaaaaaaaaaaaaaaaaaaatcaggccagtagactttcatgagtgttctgccctaccagcatccttcagcacaagatgtacctgctccaccaatggcaagccatagctgctaacaagatcacggtaattcagagctcctgctgcttcttgcctgggtagtcaatgaagtctcaccaggggaagaaaagaatgttcctccctgaattgttcatcaggatggactcattactcgcttctttctgcttggactgaagcgacaggatagcaatttagggatggctgatctaaagcacatcaaggcacggtcgctgagcaggtgcggtggcaccaaattcaaggaaaccccataggtagttcccaccagcaatgtgggtttcagcctttataccagcaccatctgaacaagccccataaaaagtgcagattacaaagcagaagcattttccatgtgggctaacacatgaggtggttgaacaaaaaagcagtagaagagacagccatgcccagaggccagctcagttcttgatctggaagttactttctgccttttttcctgtctctgtttctactagaagcccgctttcttcaatctgctttattttttattttagagagaatgtctcactgtgtcacccaggctggagtataatggcacagccatagctcactgcaaccttaaactcctgggctcatgccaatcctcccatctcaacctctggagtggctgggactacaggtatgcaccatcacacctggctaaatttgtttttttttaagagatggggtgttcctatattacccaggctggacttgaattcttggcctcgagtgatcctgcctccttggcttcccaaagtgctgagattacaggtgtgagccacttcaccaggcccaatctgctctttttttttttttttttttgagatggagtctcactctgtctcccaggctggagtgcagtggcacaatcttggctcactgcaacctccacctcccaagctcaagcgattatcttgcctcagcctccagagtagctgtgattacaggcaaccactaccacacctggcaaatttttgtacttttagtagagatggggtttcaccatgttggccaggctggtctcaaactcctgacctcaggtgatccacccaccttggcctcccatagtgctgggattacagccatgagccaccgcacgaggcccaatctgcttattaatcttagtgtacagttcctactatgtgccaggcatcgtgctaagtgctttctataccttatcttatgtgattctcacaattcgctaagtcctattatttccccctttctcagattcagaaactgaggctctcagaggttaagtattttgcccagggtcatgcagttgttatggggtagagctaggatttagactcaggtattcggattccagaatcccctcacccttgccattaaaggtgtggtctctggaacagggacatcagcagcagaagcaagtatcatccatcacctcagagctggtaagaaatgcagtctccaggctcggcgcagtgactcacgcctgtaatctcagcactttgggaagccgaagcaggtggatcacgaggtcaggagatcgagaccatcctggctaacacggtgaaaccccatctctactaaaaatacaaaaaattagccaggtgtggtggcgggcacctgtagtcccagctactccagaggctgaggtaggagactcacttgaacctggaaggcagaggttgcagtgagccaagattgtgccactgcattccagcctgggtgacagagtgagactctgtctcaaaaaaaagaaaagaaatgcagtctccagtcccaccgccatgcccgacactgaaggaaaatctgcatgttctttttcttttttttttttaattttttgagacagagtcttgctgtgttgcgcaggctggagtgcaatggtgccatctctgctcactgcaacctctgcctcccgagttcaattgattctcttgcctcagcctcctgagtagctgtgattacaggtttgtgccatgacaccaggctattttttgtatttttagtagacagggtttcactgtgttggccaggctagtctcaaactcctgacctcaagcaatccacccacctcaccctcccaaaatgctgggagtacaggcacgagccaccgcatctggccaaaatctacattttaacaagatccccagatgagtcctgtgtcattaatctgatctagtgccatatgtctgctgcccactgatgtgcctctcctcttctcctcccaatccacctccacaccctggtaactaagtgctgggacaggtagggaccagggagtgctgggggcagggatggagaaggggcaggtgttcacctagagctcaaggctggtacacatgctgggtgggacccagaggggtgctgagtgggacccattacttccacagacacggaaacaatttttattactacttcccaagcctggcaatgtttcatgatgcaaatgggctggactgctcaccatttaatatttctcttcagtacttgaatcattaccaagacacagccacctaccactgacctctgttccccagaggatttggacagtcattagagcccattttagtgcagaccttgtccttttgataaatgagttgaaacttaaactccttggctgagaatgattatccagcccccgaatggaatagatctggtgttggggtgggggttggctagcatctcatccactggctactcaccctggagtacatctccaggtctccaagggcttttctgaaatatatccctgggtcctctccaatatcaataaattagactctgcagggtcgcccaggaatatacatttgttgttgttgttgttttgtttttcttgagatggaatctcgctctgtcacccaggctggagtgcagtggcgtgatctcggctcactgcaacctccgcctatcgggttcaagcgattctcctgtctcagcctcctgagtagctgggactacaggcatgcgctaccatgcccagctaatttttgtatttttagtagagacgggatttcaccatgttagccaggatggtctcgatctcttgacctcgtgatccgcctgcctcggcctcccaaagtgttgggattacaggcattagacactgagcccagccgaatatacgttttaaatgctttccagttgaaaacagttattttggctgggcatggtggctcatccctgtaatcccaggactttgggaagccaaggtgggtggatcacttgaggtcaggagttcgagaccagtctggccaacatgctgaaaccctgtctctactaaaaatacaaaacaaaaacattatccaggcatggtggcacacacctgtaatcccagctgctagggaggctgaggcaagagaatcgcttgaacccaggaggcagaggttgcagtgagccgagatcattccactgcactccagcctgggtgatggagtgaggctctgtctcaaaaaaaaaaaagaaagaaagaaaagaaaaaggaaggaaggaaaggaaagaaagaaggaaagaaggaaggaaggaagaaaaagaaagaaagaaagaaagaaaaagaaagaaagaaagaaagaaagaaagaaagaaagaaagaaagaaaaaagaaagaaaagaaaatagttatttctattacatcacctcccctctcccaccaaaaatcctggggactagaataaatcagccttggcacctggttatctgaacgatgcttggtcacatccagaggcaggtaacactccctaatgagacagccctgtttcattttgagtcagctccaaatatgagaagtttttctccagtctctgaggttggactttgcctctctgaaacctccactgaacatctcatttctaactctttgaccaaacaaaatatgcttaatttctcttttacctcccagccattccaatatttggaggcaaatgggaagtggaaggagcaaggatttagaaatctattagaaatgggctcaaattgctgctctgtctgatacatgttatagcatggatgaactctgaaggcatgctaaataaagtaagacagacacaagaggaaaatattgtgtctaagtcctcttacatgaggtaccttgagtagtcaaattcataaagacagaaaaaagagcagtggttactattggagggatgggagaatggggagttagtgtttaatggatacagagtttatgttcaagatgatgaaaagtttctagaattggatagcggtgatgaatgttgatatggtttggctgtgtccctgcccaaatctcatcttgaattgttgttcccataatccccacgtgtcatgggaggtaaccagggggaggtaatttaatcattttggggtccttaccctcatgctgttctcatgatagtgagtgatttctcatgagatttgatagttttatagggggctttcccccactcattctcattcttctctcttgtctgctgccatgtaagacctgcctttgctcctccttcaccttcaaccatgattgtgaggcttccccagccatatggaactgtgagtccatttaacctctttcctttataaattacccagtctcaggtacgtctttattagcagtgtgagaatggactaatacaaacgtacaacattgtaaatgtgtttaaggccgctgaatttgacatttaaacacggataaattttatgttatgtatattttaccacaataaaaaaaatcaaaaaatgctgctgtcatttactagctatgttgtttctctgagctgcagttttctcatctgtaaaatgggtactgtttaattgtaactactgtgcatgttgttgtgacagtcagataggtttagttaattaaagtaccatccttgtattttcatggaaactttgagagtagaaagttaatacatgatgactgatgggaaatccggatttataatagctggcattattaacactgccataaaatcaaaattagccattagtcagagagggcagaattcatgctttaagacatcagaataaaaataagtttgaagatgaaacaccaggcttcaaagacatttcggcttttagtgggcagtggagctatggacccagacctgctccagggactcctggctgattctcctctggggttaggaagttggcagtctgagaagctctgctcgagacaatggtttccatcccctgctgtgtttcagaactgcctgagacaattattaaactaaagacacctggtcccgtccctggagcctacaatttagtcaggcattagttcaggatctggatgtatttttagtttgctccaagcgaatctgaggcattaccaggtttgaggaccactgcgctagggacttctggctgccctgactgcccaagagtagttcaagtagctgagtgaggagttttgatgggagacctgagagatggtcctaacatcccagaagttccccacatggctaagaaagagagggcagccctaacttgggagcaaaaatcagttgaaggtttgtattaatcagggttctctacacaaacctaacagtaacattctgcttatatataggatttattaggttgatgcaaaaataattgccattactttcatggcaaaaactgcaataattttcatttttttttttttgagatggagtctcagtctatcacccaggctggagggcaatggcacaacctcagctcactgcaacctccatctcctaggttcaagtgattctcctgcctcagcctccggagtagctgggattatagggattacagacagctaatgttttttgtatttttagtagagacagggtttcaccatgttggccaggctggtcatgaactcctgacctcaagtgatctgcccacctcagcctcccagagtgctgggattccaggtgtgagccactgcacctggcctgcaattacttttgcaccaagctaatattatgaggaattggttcatgcaattatggagaagttcacgatctgccaactgcaagctggagacccagcaaagcccatggtataattcagcctgagtgtgaaggcctggaaccaggagaactggtgatggaaaagtcgctccgagagcaggggaagaggagagaagaggagattctctggctgacgcagagagacaggggaaaaggagcatactcctcctccttctgccttttgttctattcaggcctttggtggattggacaatgcctacctacattggggagagcaatttactttactgagtccacagattcaaatgcttatctcctctgtaaacaccctcatagacccatccagaaataatgttgaatctgggccctacttggccagtcatgttgatacgtaaaattaataatcacaaaaatcaaagacggaaagtaaccagaaagagatgacaaggagactgcagcatagctttagacctgggtcaagttcagattaaacttcttttaatcgaaaacatgtaatggggtcaaaaaactacctatcgggtgctctgctcactatctgggtgatgaaataatttatacaccaaataccagcaacacacaatctacccatgtaaaagacctgcacatgtaccccctgaacctaaagtaatagttgaaaaaagacaaaagcaacacacacagacacatatgcacacacacacacacaaacaaaaacaaacaaacaaacaaacaaacaaacaaacaaacaaaacagggccgggcacggtggctcacgctgtaatcccggcactttgggaggccgaggtgggtgatcacttgttaggagttcgagaccagcctggccaacatgacgaaagcttgtctctactaaaaaatacaaaaattagccaggagtggtggcacatgcctgtagtcccagctactcgggaggctgaggcagaagaatcacttgagcccaggaggcagaggttgcagtgagccaggatagtgccactgcactccagcctgggcgacagagcaagactctatctcaaaacaaaaacaaaaacaaaaaacatgtaacatagctccactgtacagcgtttgcttacagaggttgcttctgcaatgaagagaattaggcatctgacttgaggtatgattacagactgcagtgaaagctggaagttgaaaagtggaagagttatgtgctgagtataaattctggtgcaccaaaggttctattactttctatctcaaaatcaaatttcaattgctctgggctcctacccaatgactagcagaaagttcaatcctcatagattcctgagtctgtcactcactcctcctccacttggtcagaaagtccctgggctcctgtggccttagaaaagtggcccagctgtctatggccatgtcaccctgaacattctccgtctgtctgatcttggaagctaggcagggtcgggcctggttagtacttggatgggagaaaagtggggcaggggctgagctaaggccttcgtccatgatcccagcatctctcaagttgatccttgggttccaggatgctacggataagctctggtccctgccaagacatggtctctgtatgtcaggctttgctgctctgggggtgacaatgatagccccatagaggttctcttcattgactgaaaggacctcatgcacagggtgtgctcatacatgcttgaggggcagtcaattcccctctggtcagtttctgcctcccacactccttctaactgctcccatttggttatttccacagaactgccccacctgcccctgcaatgagtcttcacacataccatactggcctctccttctcagggatgggagcgagtggagaatggcgagtataacttaggttggcaactctttttttttttctccttttaataaatctccctgatcctgctgtgaagccccagggttggtttaggtgggagggtcggaggctgagatggctcctttcctttttattaccatcagcatatttgggtaaaagacagagctgccaaccaatgatggctatggtagccttgcagtcagagagaatgtgtttatgaagacggcagaaagagagcaagcggacccaacgccactcccaccccactaagaagccacttcacagcacatacttttcctgaatcatcagttggacctaattccttttagctgttaagaaaagctgaatcttgtctaaaaacagtcccatctataatattaagtctggccctagggtttgtgttaataaatggctatagtgtaaaacaacctgaaacttctgctttgccaattctattctagatgtggatgagtcagggttctgggttgcaagaaacagcgagtaattggcaaacgtgagcagaaaaggaatgcactggaaggaaatcagggagctcatgtattcttcgagaaggctggagaatcaggcttggaaaaggcagagccaagggaggtgtgggagcaggaagcccagcaaggggctgcacagacagcatgactctcccccttcttttttaatagcgtttttttatttgtgcagtaagccattggcttaaaaaatgttttaagtggggagcgcctctgccccgccgccccatctgggatgtgaggagcgcctctgcccggccgagaccccgtctgggaggtgaggagcgtctctgcccggccgccccgtctgagaagtgaggagaccctctgcctggcaaccaccccgtctgagaagtgaggagcccctccgcccggcagctgccccgtctgagaagtgaggagcctctccgcccggcagccaccccatctgggaagtgaggagcgtctccgcccggcagccaccccgtccgggagggaggtgggggggggtcggccccccgccaggccagccgccccgtccgggaggtgaggggcgcctctgcccggccgcccctactgggaagtgaggggcccctctgcccggccagccgccccgtccgggagggagatgggggggtcagccccccgcccggccagccgccccgtccgggaggtgaggggcgcctctgcccggccgcccctactgagaagtgaggagcccctctgcccggccaccaccccgtctgggaggtgtgcccaacagctcattgagaacgggtcaggatgacaatggcggctttgtggaatagaaaggcgggaaaggtggggaaaagattgagaaatcggatggttgccgtgtctgtgtagaaggaagtagacatgggagacttttcattttgttctgcactaagaaaaattcctctgccttgggatcctgttgatctgtgaccttacccccaacccggtgctctctgaaacatgtgctgtgtccactcagggttaaatggattaagggcggtgcaagatgtgctttgttaaacagatgcttgaaggcagcatgctccttaagagtcatcaccactccctaatctcaagtaatcagggacacaaacactgcggaaggccgcagggtcctctgcctaggaaaaccagagacctttgttcacttgtttatctgctgaccttccctccactattgtcccatgaccctgccaaatcctcctctgtgagaaacacccaagaattatcaataaaaaaataaatttaaaaaaaaaaaaaaaaaaaatgttttaagcattttaaagttacagtttagtagcattaagtacattcacattgttatgcaaatatcatcaacctctatctctggatttttttcattttcctaagctgaaactctgtatccattaaattctaactcctaactcctcatttgccccttctcccggctgctggtaaccaccattctactttctgtctctatgaatttgactattctaagtactgatgcaagtacttagtataagtactaagtactgatgtgatgtaagtacttagtatgagtactaagtactggtgtaagtacttagtataagtattaagtactggtataagtacttagtataagcattaagtactggtgtaagtacttagtataagtactaagtactggtgtaagtacttatgtaagtacttcacataagtggaaccacacaacatttgtcctttcatcactggcttatttcacttagcctaatgtctttaaggtttatccatgtcgtaggtcagaatttctttcctctttaaggcagaataatgttcaattgtgtgtctataccatattttgtctatccattcatcaatctataacttgggttgctttcatcttttggctatcgggaataatgctgctataaacatgggtgtgcaaatatctcttcaagtccctgctttcaacttttggggtgtatataaccagaaatgggattgctggatcatattgcaataatcttcctctcattcctacatctttatgaccctctcttaagatgcaatgttcagggaggagtacagccaacattcatggtgcccttgaccacactttctcaggctgcctctcattgtggccacagctaggtgcaggcatgctgagtcttccacctaaagcacccactgcttctctggctgaaccccaaggaattcactcagttttcagtctgcagcccagaagtgatgggagagttaacacactccagagtctatcctcactcagtgccccagtccccctcctttaaaacaaaaacaaaaacaaaacaaaaatcctgcttcattatatcatataattcacttatttaaaatgtaaacttccatttttttagtatattcacagaaatgtacaaccatcaccacagtcaattaattttagaacatttttatcatgcccaaaacaaaccctttaagctatcaccctcctactcccctaatcctctcatccctaggcagccactaatctacttcatttctctataaatttccctgttgttaacatttcaaacaaatggaaccatagagtacatggtcttgtgtgtctggcttcttttgcttagcataatcttgtcaagattcacccatgttctagcatgtatcagaacttcatgtggctcatgcctgtaatcccagcactttgggaggctgaagtgggcagatcacttgaggtcaggagtttgagaccagcctggccaagaggatgaagccccgtctctaccaaaaatacaaaaattaaccaggcatggtggtgcgttcctgtaatcccagctacttaggaagctgaagcaggagaaacacttgaaccctggaacccagaggtgaatattgcagtgagccaagatcacacactgcactcctacatgacagagcgagactctgtctcaaaaaaacaaaacaaaacaaaaaaaccttcattcccttttatggctgaataatattccactgtatggatataccacattttatttatcccttcatcagttgatggacatatttgggttgtttccacctttagctattatgactagcattactataaatattcatatacaagtttttgtgtggacatatgttttcatttctcttgggtacatgaccaggagtgaaattgctctaggcttccgttaagagtaactgtgagattcattctatattgttcatcagatggtccccaacaggatggatggagctccagtgtccacactgagaagctcagcaagacagccttcattgttgccacctccttttacatctcactttcctcactcctacagccttgctccctaggatgactcccaaaataaactcccgacacccatgcccttgcctgttgttctgctttcaggcaatccaaatgaagatatgaaagttcggccaggcacggtggctcatgcctgtaaacccagcactttgggaggccaagggaggcagatcacttgaagtcaggagttcgagaccagcctggccaacatggtgaaaccccgtctctaataaaaatacaaaaaaattaaccaggcatggtggtaggcacctataatcccagctactcaggaggctgaggcaggagaattgcttgcacccaggaggcggaggttgcagtgagccgagtttgtgccactgtactccagcctggatgacggagtgagaacctgcctcaaaaaaaaaaaaaaaaaaaaaaaaaacaaaaagatatgaaagtgcataagagttcaggcctgttcgtgttcctgttcttcacgtgtcagaggcaagaagcatgaggcctcttcaccttccataaagggagatggcgcccactgcacaaggtgtctgatgtaaactaagaaaaaccaaataacaacagcaaccaaaaaaaggtgaaagtcacaaggtgatcccaacgggtggaggaagaggactagcatgttagatgcatatgatgctaacaggggccctgtatgcattattctgtttaattcccacaacagcccggagaggttgataatttgcctggggttatcccagaagtgaaggagcccagatcagcagccaggttcctccgattccagtggctgtcctctgtcacctctccccaccctctggtcagtgctcttcacagcaaactggtaatttcctaactgcctttaagtgaaagtatctttttggctccacattctactgcaaaggaagccagatgctatttttcagtcctgtgaactttccatttctggcaggtggctggctctccttttccctggatagaatgtaatttccatttgctttccagcaatcttattgattgaacatgcttccaaattttttcatctttgacacgtttcttacaatgtaattttacagggcaggaatcatccttgttgaagaggagagtccaagacggggcggcattcttgtgtaatgagttgctttagctttttctttttttctttttcttttttttttttttttggctaaaactaagaatgtgtcagtggcaaacactaaaaatccacccccatttacttcttgtggctgttcctgagggatgtcagtgataaagtcacccaacttacaaactttacagtgagtcactcatcccattaaaggcccttgagatgtacgataacagcaaaaaaaaaccccacctttccagaaggatatcataacaattagaaaatcagtcatgatggcagtgaacctcaatgttctgatccacaaaataaggctttggtgaagaataaatgaaattacatttgtgaaaattttgcagtgtgagcttttattactcgtatctttacaaagaacataatagatactgctacatttttgcaaagcaagctgacatctggagtatgaaacaatcattaataattatctgtgctggtcaggcatggtggatcaaggttgtaatcccagcaccttgggaggccaaggcagggggattgcttgaggccaggagtttgagaccagcctggccaacatagtgagactccatttatataaaaaaattaaaaatcagccaggtgttgtgccacacacctaaattcctagctacactggaggttaagacaggagggttgcttgagcccagtaattcaaggctatagtgagctatgattatgccactgcactctagcctgggagacagagatagagcctgtctctcaaaacaaaacgaaaacaaaacaacaacaacaaaaagctgggcacagtggctcatgcctgcaaccccagcaccttgagaggccaaggcagaaggactgcttgagtccaggagttctagaccagctggacaatgtaccaagacccccatctctttaaaaagtgtagctgggcctgggtggtacataactgtagtcccagctactcaagaggctgaggtggcaggatcccttgtgcccagaagttggaggatgcagtgagctgtgatagctacacactccagcctaggtgacagtgacagagcaagatcctgtgtctaaacaagaaaaagaaacggtatctgtgcaaaaaaaaaaaaagtattcaaaagtctaaaccttgtgttagagacagccattgcacaaacaagaagaaagggaattcattagaccatgcataagtatcagaaagagcctgaatgtttttttaaatcattattatttacaatttttttttttttttttgagacggagtcttgctctgtcacccaggctggagtgcagtgacgcgatctcggctcattgcaagctctgcctcccgggttcacgccattctcctgcctcagcctcccaagcagctgggactacaggtgcccgtcaccgcgcctggctaattttttgtatttttagtagagacggggtttcactgcattagccaggatggtcttgatctcctgacctcgtgatctgcccgtctcggcctcccaaagtgctgggattacaggcgtgagcaactgcgcctggcctatttacaaaaattttttagagacagagtcttgctccatcatccggctgcagcctggacttcctgggctctgacaatcctcctacctcagcctcctgagtagttagtattacaggcataggcaaccatgcccagctaattatttttaaagtgttttgtagaggcagggtctcactatgttgcccaggctggcctcaaattctagacctcacctggcatggtggctcacgcctgtaatcccaacactttgggaggccaaggcaggattgcttaagcctaggagttctccaactccagcatagtgagaccccatctctaccaaaaatacaaaaattagcctgacatggtggtgcatgcctgtaatcccagctactggggaggctgaggtgggaggcttgctcgagcctgggaggcagaagttgcagtgagccaagatcgtaccactgcactccagcctgggtgacagagtgagactctgtctcaaaaataaaataaataaaaacaggccaggcatggtggctcacacctgtaatcctagaactttgggaggctgaggtgggcggattgcctgagctcaggagttcgagaccagcccgggcaacgtggtgaaaccctgtctctactaaaatacaaaaaaaaaaaaaaaaaattagccaggcatgttggcatgtgcccgtaatcccagctacttgggaggctgaggcaggagaattgtgtcaacccaggaagtggaggttgcagtgagctgagattgtgccactgcactccagtctgggcggcggagcaagactccatctccaaaaaataataataataatagtaaataaaataaaaataataaaaataagaaataaatatatcacctcgttagtccttacaacaaagccaatagcctttgttcacataagtggaatcccactctcatttcatagctaagaaaactgaggctcagaagagaataggatttacccaaagtctcaggaattcatctgagccctatggaccaccccacagcagtgcagattatctttgcaaggtattacgtgcctaagacagtctttccagtagatgactcagtgagctggcaccacttgcagactagccagtagagtgaccacagtgtatcaggaagatgtgtcactgagaaaacaaaaccagcaaggattgtgtgatgccacagtgactcactgtgcccaaggtcccccactctaactaggagtattccccagtggcctttatacaacttgctgatcttttcctacttggctcgtctactcgccgcacaatcattcccatgcagccccaccccaccccagtcccacccgtcctcctgatggggcctgcttctcatcctccgctgaggtgtcagattgacttccagaggcttctgcagagcacttctcactccaatctcctccaattctctaagcacaagcaggaacctgggcatttccagctgctcaagctaagaggtcccccttccagcctggctcgtgctggtgcttaggtggggctcctgtccctatcccctacagctctgttgtctctcgatatgtcactctttgcaccagaaagaacaaccaaggatcattctcaatgcttcacacagaaaccctcttctcccaaatgaatttcccgttccctttctcagggacccccaaaggtatagctgcagcctcccagaacacttattctacaggaggctgcttagaccacagctgtattcgggaaaaggaaatttcattaggatgtaatgatctcaggcctccaaagccctggctggctggaaaaaggaggctacagtcaggatcctgtccaagccgccagaagaagtggctgatggctttctaggctgcctctctctgtgcataatcctgctcatatctcactggtcacagctgcaaaggagtttaggagtgtagtatcttagatgggcacatatccctagaaaagcattgcaaagcagaaggggaaaatggagttgggtagacaacaagtattctcagaagataagggcatagctggcaatctgaacagtgagtgttaaggttagccattccaatatcacacagataagaaaaggccctatgatttggcaaccaagagattactcatggccttggaaaagacaaacctagcagaacactggattgggagtggggttaagcaatgagtgggggtgaggaagtggagacatgggacccagacttttctacagagatgtttcagtaaagagaaatgagggctgggcgcagtggctcatgcctgtaatcccagaattttgggaggccgagacgggcggatcacaaggccaggagatcgagaccatcctggctaacatggtgaaaccccgtctctactaaaaatacaaaaaattagccaggtgtggtggcgggcgcttgtagtcccagctactcaggaggttgaggcaggagaatagtgtgaacccgggaggtggagcttgcagtgagctgacacagtgccactgcactccagcctgggcaacagagaaagactccatctcaaaaaaaaaaaagaaaaaaaaagagagaaatgagagacagagaaatagacagctgtattataaaaatatacacataattcctaacctttattttgactgcttcttttcctctccccaactcaatcttggcaacagttactaatagcaaaattgactgacctgagttccagcttctctctgttcttcttcccagggaaggtgctaatgaggaatgaaatggccaaaggctgaactgcgggagggagaagtgaagctctggaacatgcagcagctgagcgtggagcactgaggattttctccatgacaaaaaggagttttatcatggccaggtgtggtggcttatgcctgtaatcccagcactttggaaggctgaggtggtaggattgcttgaggccaggagttcaagatcagcctgagcaacatagcaagaccccgtctctaaaaaattaataaataaataaaaagattagccgggcatggtggcctgtgcctgtagtctcagctacttgggaggctgaggtgagaagatggcttgagccctggaggttgaaatgcagtaagcagtgatagcaccactgcgctccagcctgggtgacagagtgagaccttttttttttttctttcagtgaaagtacagagatttattgcaaaggcagaattacacacttaagaaagggaagtgcaagtgcaatggggtttggagtccctacatttatgggtttattgaattaaggggtggaatattcatgaagattcctggaaaaagatggaaatttatcagaactgcggtgcaaacctaatgctaagaaaagttctaatcatagaagaacaaaaccccttgagaattaaaatgaatgaaaatccatttgcctctttcattacccctacaataataggactgcccatagttattttaattatcttattcccaaatattctattcccatcatgtagtcgcctgatcaataactggctggtttctgtacaacagtgactaatattaaaacagataataataataatgtataacatcaaagaatgaatctatctcttttttttttgagacagaaaatcgctctgctgccaggctggaatgcaatgcctctatcttggcccactacaatctccacctctctggttcaagcgattcccctgcctcagcctccggagtagctgggactacaggcgtgtgccaccacatctggctaattttttgtattttagtagagaaggagtttcactatgttagccaggatggtctcaatctcctcacctcgtgatccacctgcctcagcctcctaaaatgctgggattacaggtgtgagcccatgcacacggccactctcttaattcttgtggcaaagcatttctgaacaagtgagggctatccttaaagccctgaggcagtactatccaggtgtactgctgggtaaaattagtttcaggattagtccacccaaaagcaaacaaaaattgagagtcagagtgtaaaaggatacaaaataaagcattattgaaatctaatatcgtgaatcaattggtgtctctggtatttgggtaaatatggcataaggatttgacactatagggctgggcgcagtggctcacgcctctaaacccagcactttgggaggccgaggcatgtggatcgcttgaggtcaggagttcgagatcagcctggccaacatgatgaaacctcgtctctactaaaaatacaaaaattatccaagcatggtggtgcgtgcctgtagtcccagctactccagaggctgaggcaggagaattgcttgaacctgggaggcagaggttgcagtgagctgagattgcgccactgcactccagagcaagactccgtctcaaaaaaataaataagtaattaaaaaggatttgacactatagaatgtaaggtaattacaacctcattaatagctcctaagtcttgaactagatgattattctgcatttggtttttggacagggacggaaggagtattacaaagagactgactgacatggaaccaggaggccctgttttaaaaacttctcaattaaaggttggcgtcctcacctggcttccggtttgagggcatattggctcttgcatgggaaattgtttttgtctttaaagcgatgatcacggctgggcgcagtggctcaagtctgtaatcccagcactttgggaggctgaggcgggcacatcacaagatcaggagatcgagacgatcctggctaacatggtgaaacccgtctctactaaaaatacaaaaaaaattagccgggcgtggtggcgggcgcctgtagtcccagctacttgggagtctgaggcaggagaatggcttgaacccgggaggcggagcttgcagtgagccgagatcgcaccactgcactccagcctgggcgacagagcgagactccgatctcaaaaaaaaaaaaaaaaaaaaaaaaaaagagatgatcacaggctgagcatgtattgctttgcaaggggtttcttggtcccatacttatgggtctacttgagactttattttatggaggatctcctgtttttctgaggctggtttagaaaatacaagcattgccaagaaggagggcctgataaatgtaaagtggctgcaaagctggctaggaagtcctgtctcaataaaagagtaggacattccagcataactagaaaccagagttaccatatagttttctagcctgtagcttaggggtaaagtgttttgatttgggggtgccattgacacccatgacagtgcagcttttggagaataagggcccagagtggcagttcaggacagagtggccactgagtcaattaagaaattaatatttgccgggcacagtggctcacacctgtaatcccagcactttgggaagctgaggcggatgaattgcttgagcccaggagttcaagaccagcctgggcagcatggtgaaactctgtctctacaaaaaaaaaaaaaaaaaaaaaaatacaaaaaactagctaggcatgatcagggctgcccatagtcccagttactcggaaggctgaggtgggaggattacttgagcccagaaggtcaaggctgcagtgagccctgatcacgccactgctctccagcttgggtgacagagtgagaacttgtctcaaaaagaaaagaaaaagaaattaatattcttggctgggcgcggtggctcacgcctgtaaagaaaaaatttaattttctttttttttaggcagagtctcactctgtcacccaggctggagtgcagtggctcgatctcggcccattgcaacctccacctctcgggttctcctgcctcagcctcccgagtagctgggattacaggagcccgccaccacgcccggctaatttttggtatttttagtagagatggggttttgccattttggccaggctggtctcgaactcctgacctcgtgatccacccggctcggcctcccaaagtgctgggattacaggcgtgagccaccacgcctggccaaaaattaatattcttaccagccacgtgaagaatcactgaggctcctcagttgtgatgaccatgccttttgtgggagccaccaggaaccttggtctagttacagccatgatggcatcgggcattctcctttccctttggagctgaaggtaatcccttttccaatggccctcctgcttgcaggacagggtctaggtggggtcccctgactgggacagtcttcactccaatgtcctggcttcccacacttgaagcagcaaccattgcctgcaggtttgctgttaggcctgtttggtccatgggcgaagcatccccccgggtgaccctgaggttacagggcgctgcttacagcaactgctgtcattggagcatgctgtctgttctgttgtttgccacgctgggtcctttcagcctctccagccccgtccctattactaaataccccaaaagccacatcaagcatttgattaataggcatttggggtcctcaagccaatttctgtaattttattctgatgtcaggtgctgactggttaataaagtgtgtccctagtaaaatctgtccagcatcagcattgggggtcaatgttagtatattttgttagggcttccacaaggcaccccgacacaaatctgggttgtcatcctttccttgagttattccccttattttattatagttcacaggcttagcagtacattttttatttccttttttttttttcctttttttgagatggggtctggttctgttgcccagactggagtgcattggcacgatcttaaccaactacaacccccacctcctaggcccaagccatcctcccacctcagcctcctaagtacctgggactacaggcacatgccagcatgcctggctgatttttgtattttctgtagaaatggggtttcgctgtgttgctcaggctggtctcaaattcctgagatgaagcaatccacctacctctgcctcccaaagtgctgagattataggcgtgagccaccatgcccagcctggtacatttttttattccctccactaaacaagtcaccatatgatttatttttcttacatcagcctggctctgttgatcgttccaattagggtcattgtaaggcatagatgtggtccccacagtgtattgctcatggtcctcagctgatgaaatgccaagtgcaagagctcagcccttacaattggtcacctccatggccatgacagaagacaggcattcctagacccttggctgactgccttggcatgtaggcatccctggagccctagtgttgtccagggatccatggcccctgaggctttgaaaacggggaggctttcaaagagaagccggaccagctgtaggtttcatttgaaagtcacaagcctgctgatatccatctgaacgtttatcaccaagtaccacttggaagtagagatgattcagcacagccaataaacagggaccttgaagggacccattaagaatcagaggcctggatttggcattccagagggcagtatctaggaggcctatcttactgtgtccaaaatgttcactaaacctttgtgtgaagtaagaagaagcagcgtggggagagaaaattgcaaaagccggggtttttttgttttgtttttgtttttgtttttgagatggagtctcactctgttgcccaggctggagtgcagcaatgtgatctctgctcaccgcaacctctgcctcctgggttcaagtgattctcatgcttcagcctcccaagtagctgagactacaggcgtgcgccaccacacctggctaatttttgtatttttggtagagacagggtttcaccatgttgaccagactggtctcgacctcctgatctcaagtgatccgcccaccttggcttcccaaattgctgggattacaggtgtgagccaccgtgcccagccaaaaagccgagtttaaagagagacaggaaaaatgaaacagctcccaaccagggtcagtgtcttgccacagctggtcccttgggaaaacagaagatccttcccagaaaaaagtcacagtgctccttggaagccatctagccactgcacggtgtgggattttaccctccaccctctttagcctccagtcaggaaggacggtagctcctcagggctactcagtgtaggttgaaaccttcccacctccctctcatcccatcaggatgaactgggttttccagccagagggagcagaggcgctacagctgaggggagtcaggctgcagttgacgccaaggaacgaggaagaaattagcagtaactccagagagtgagaagactccgactaatattggagtaggatttataaactgccagtggttctagaattcggcaacgacactccagcctggatggccataaagatgacaccagtgggctgagggaggtccccaaacaccgatgggacctcgaccccagctggtgtccaggctcttgacatcatcacaagaaggcattcaaaggtgggtcagaaaataatgaaattacagagatttattgcaaagagaaaagcacacactcaagaaagaggagtgcaaacaaacacaaggagagtcacatgagaaaatacgttttactgattcttactcctgctggccctggctttctccttccttgtcttcctttttttctccccttgtgatcctttctctcttccatccccaatatatatgtcttagatagggaacttagatttattgagcatctactatgtgccaggtactgggctttgggcctcatggactccatctcacttagttcttccagcagcttttggagggatgttcattattattcccactttacagaagaggaaatggaggttcagggaggttaaatgatccaggtcacacagtcaaatggattggcgctgggaactacatctagatctgtttgactctaaaacactattctctcctttattttttgagggtccatgaagcactatcaaggagctacagaatgtcaattacgttcctctttggagtctttgttgcccaggctagaatgaagtgatgcaatctcggctcactgcaacctcccaccttccaggttcaagcaattctcctgcttcagtctcccaagcagctgggactgcaggtgcctgccaccacacgtggctaatttttgtatttttaatagagatggggtttcaccatgttggccccgctggtctcaaaatcctgacctcaagtgatccacccgcctcagcctcccaaagtgctgggattacaggagagagtcaccacacccggccctcaattgcatccttgagtacaaattcacataacacacatggaattcctgtttgcttatgaatcttcctatcaggtgccactgatctgctagtagaaatcctcccaaggaaaagcttgaagaatgcaagtgttttgctgtctgtctaggttttttgttagcctaaggagacacacaagactccagctgctcagccagcccctccgggagcctcagcctgtgagcaaagtgatggtgagcaggaggcagagaccacaggcttctgtttacagaatctctcagacaatggacaaaagagtagcaactttcataacaacttgacattgatagagtttccaatatagctgcacattttctactgttattgctccaatcttcttcatgaaaagtaaaagggggccgggcgcggcggctcacacctgtaatcccagcactttgggaggccgaggcaggcggatcacctggggtcaggagttcaagaccagactgaccaacatggagaaaccccatctctaccaaaaatacaaaattagctgggtgtggtgatatatgcctgtaatcccagctactcaggaggctgaggcaggagaatcacttgaaccggggaggcagagtttgccgtgagccaagatcgcgccattgcactccagcctgggcaacaagagtgaaactctgtctcaaaagaagaagaagaaaaaaaaaaagtaaaagagggcagggcatggtggctcacacctgtaattttgggaggcagaggcaggaagatcacccaagcccaggagttcgagaccagcctgggcaacatagtgagacctcatctctacaaaataatacaaaaataagatggatgtggtggtgcacacctgtagtcccagatacttgggaggctgagatgggagatcatctgagccctcagtggttgagactatagtgagctgtgatcacaccactacatcccagcctgggtgacagaatgagaccctgtctcaaaaataagtaaataaataaaaagtaaaagaaggttttggtcctcacttggataatcagcagtaataaaaacatctggaatgaatccactcagagcctttccaataaccagtctctctctctctctctctctctctctctctctctctgtctctctctttagcacaggttaaatttctgattgttccttgaggctttttttggtggaaatctatgttaaagcatattttatgtggcagaggaggccaaaagtgatggctgcatgcttacttattatttttccatgaaatagcattttagggatccaaatacaacctatttgatccacagacatgtactgatcacttccaaggctgcgtaaacatttaaagacgttctttgatgtggttagacaaagatgccctaagctatgggtgccagttaactagttaatgccaaatgtctggaggagccaatttgttggtcatttttaaaaaagatctgtgatgagcagtaagaggctatctgaagcattttgtctttcattttttaaaaacctggatcaagataccatgtgcaatatgaatatttttctttcaaaggcaagtattatacagaagttatctctatgggggctgggcatggtggttcacgcctgtaatcccagcactttaggaggctgaggcaggtggatcacctgaggtcaggagttcgagaccagcctgaccaacatggtgaaaccctgtctctactaaaaatacaaaaattagctgggcatggtggtgggcacctgtaatccctgctacttgggaggctgaggcaagaggattgcttgaacccaagaggcagaggttgcagtgagccaagatagtgccattgcactccagcctggatgacaagagcgaaactccatctcaaaaaaaaaaaaaaaaaaatagaagttatctctgtgggattggagaagtgggagcactagggagagaaacatttctctaatatttgtgtttgtattttattttatttttaacatgcccttgagttttcttttaaaagtttaaaactagttcaaatgcaaaaagagcataccccccccacccccaaccctgccactcacagaaagggaacacaggaacaggatgtttttgaggaaacacactccctctgtgtagattcactgaaaatatgtcaattttttttttttttttgagacggagtcttgctctgtcaccaggctgtagtgcagtggcacaatctcggctcactgcaacctctgcctcccgggttcaagcgattctcttgcctcagcctcccaagtagctgggactacaggtgtgtgccaccatgcccagctaattttcgtattttttgtgagaaggggtttcactatgttggccaggatggtcttgatttcttgacctcgtgatccgcccgccttggcctcccaaagtgctgggattacaggcatgagccaccccgcccggccaatgtaatttctttcaagctgacgagcaaagcacctttatcactaagatcactgaaggaggaatggggagaggagggtgccaggttttgccccttgagttgtttgtttgcttctctctgtcccaaacacccaagaggggtgaaggagaactacgaggcggtgttcctgaaattctagggaacacatttttggctgtaattggccgactgtttcaggcaaaatcacgacgactttagctctctactttgttttgtttgagaaagtctggtcccagcacgcttagttgtaaagtggaaatgtttctggttctgggattcattaattcggagccccctgcctgttctgtacagatgaatagggctccagcatctcagatgaccacatctgaaatccacccagaatcttttccagtaaatagaaatccattttgtacattcctacaggaatacaactgcagcatgaagagatggtctctccctatacttcacatccttccttaaaaatatacatgtatctatttctctatggatctgtttctcctatgaagcaacttgagacaaactgtggtggttaagctattttatattatcaaaataattggtgattgatagttcagtctaatatttcaacactttttagatattggagcaggtagaaatggatatagctataggtgtattaagacactctagatctgaaaattcaattgtgtaaaaggataaattaagagttgtgaatggttttcactaaatcctttttttcttcccctagataatttatttggatgagagctcttcctgttcaccttagtatctgttgaaagatgagtatttggtgaaataagttggaaaatcagaagaacttaagactaaagtgtggaaaggtcattgtgatggatgatcactcagaaatgaaatgaagttagagcatctcccaaaatcattgatcactggaccaagacaaatagatccaggccaggcacagtggctcatgcactttgggaagccaaggtagggggattgcttgaggctaggagtttgagaccagcctggacaacatagcgagatactatctctacaaaaaaaaaaaaattaaaaatcacccatggctgggtgcagtggctcaggcctgtaatcccagcactttgggatgctgatgagggcagatcacttgaggtcaggagtttgaggccagcctggccaacatggcaaaacccatctctactaaaaatacaaaaattagctgggtgtggtggcacatgcctgtaatcctggttactggggaggctgaggcaggagaatcgcttgaacccaggaggcagaggttgcagtgagctgagaatgtgccactgcacttcagcctgggcgacagagcgagactccatcgaaaaaaaaaaaaaaaatcgcctgggcacagtgatgtgtgcctgcagtcctatttattcaggaggttgaggtagaaggattgcttgagaccaagtgttgaaggatgcagtgagctatgattgtgccactgcactccagcctgggtgacagagtaagaccctatctccaaaaacaaaaacaagtagactctgagctctttaaagacaggaaccttggctttcacctttgattccaaggagtctgcaatatgtgtgagtaagatcacaagccaggagctatggactttgcccaccatgcttgagaggatatggcacaagcatgccttccctgaggcagctggatgtgtttgcggtgccagtgacctggagactggcagcagcagagtagaggaaggcagcaagggttcagagaaaggatggtgacagggcaagggggcagcaaagatgttctgtttttttcatgagaggcacggctggttcagagtctggattcttgggcacaaagagggaaagattggatgatatcctttaaaaaccaggcactctgaggcctggcatggtggctcatgcctgcaatcctagcactttgggaagccaaggctggtgggtcacttgaggtcaggagttcaagactagcctgaccaacatggcaaaacccagtatctactaaaaatacaaaaattagccaggcgtgacggcgggtgcctgcaatcccagctactcaggaggctgaggcagaagaatcactcgaacccaggaggtggaggttgcagtgagctgagatcctgctactgtactccagcctgggcaacagagcaagactccatctcagaaaaacaacaaaaacaggctgggtgcagtggctcacacctgtaatcccagcactttgggaggctgaggtgggcagatcacctcaggtcaggagaccagcctggccaacatggtgaaaccccatctctactaaaaataaaaaattagctgggcatggtggcacatgcctgtaatcccagctgctcgggaggctgaggcaggagaatcacttgaacctgggaagtggaggttgcaatgagccaagatcacaccactgcactccagcctgggcaacaagagagaaactccgtctcaaagcaaaacaaaacaaacaaaaaaattaaaaaaacaaaaaacaaacaaacaaaagccccaggcaatctgagtatcagcctccaggcagaggcggggaagcaaggaaacagaggtgctacagacaatgtttatatttcctcccaaattcctacgctaagatcctaactcccaaccttcgggcatcaggtggggaggcctttgggaggtgatcaggtcatgagggcaaagccatcctgaatgggattagtgcccttacaaaagagactcgggagagtctcgtcctcaacctgtgaggacacagcaagaaggtgtcatctctaagccagaaagtggccctcaccagatgccaaatctgccagcaccttgatcttggacttcccagactccagaattgtgagaaataaatgctctttttttttttttttttttttttggtcagagactgagtcttactctgttgcccaggctagagtgcaatggcttgatctcggctcactgcaacctctgcctcctgggttcaagcgattctcctgcctcagcctcccaaatagctgggattacaggcacgcaccaccatgcccggctaatttttattttcttagtagagacagggtttcatcatgttggccaggctggtttcaaactcttgaccttgtgatctgcctgcctcgccctcccaaagtgttgggattacagacatgagccacccagcccagctaaatgctcattgtttatcagtcacccagtctgtagtattctgttatagcagtcccaacagaccaagagagagagaagagactaattaacaccccttttgacaatctcctgtttcacaggcatcaaaaggggaatttatttccaaatccctttatgttaatctggaatgatgaggggacaagaaggccacctatcctctccggtattcccctacttccctgctgatggttcaagcgattctcctgcctcagcctcccaagtagctgggattacaggtacgcaccaccatggctggctaattttgtatttttggtagagacagggtttcaccatgttggccaggctagtctcaaactccttacctcaggtaatctgcctgccttggcctcccaaagtgctaggattacaggaatgaaccaccatacctggcaaaaaaaaaaaaaaaaaaaaaaaaaaaaaaaattaaatgcaaatacatcagctgaagaagttaatattatatgaatgatctggtcaataaaaggaggtctggcaccagattctccttctgttcagcacagcaaactagaatggaagctccatagaggaggtactttatttcagtaactgctgtgcccccactgtctggtatatagggggcactcaagtaatatttatcgggtgtggagtgaatggacctggaatatgctaggtgttgtaccacaaagtgggagaggtatcaagaaagcgttttataactcttgtagttggtgagacaacataaaaagataatttccagactgtgctggagaagcgtggagtgttgtggaagcaaagagaaagaacccagaaagacaggaactgcttaacagcgaataggaggttctactaccactgacttgggaagcagtatgctgagcaaatatggccatcctgtggtcttctaaagaccatttatctttcctaaaagtcattggttttcccctaagttgtctttctctccctcttctccatgaagacagtatataagccccaaattctaaccaacattttgagtcacattttttttttttttttttgagatggagttttgctcttgttgcccaggctggagtgtaatggtgcgatcttggctcactgcaaccaccgcctcccgggttcaagcgattctcctgcctcagcctcctgagcagctgagattacaggcatgcaccaccacatccagctgagtcacatttttttctgtgttcctacacacacacacacacacacacacacacacacaaatacaaatttacacatttatatatgtatatacacatttgtatctttgcttcttgtctgtcttttgtgagtttaattcacaggacctaagtgagtggaggaaaagtttttttctccttgacacctatcaaccatacttagccaacattgtcatcctttccttttgcccataacatcatttaggaggacatatttttaaatttcatatttaatttactacagttacagatttttaaacatatttaagtttttaagtgctgcttacaaatctgactcttctgtatacagatcactttacgggtgtttaaggaaaacaataataaactatcaattgcctgacaaagatttcctcattgagacttaacacttggccaggtgcagtggctcatgcctgtaatctcagcactttgggaggccaaggcgggaggatcacttgagctcaggagttcaagaccagactgggcaacattgtgtgaccctgtctctataaaaaaaaaactgttttataaaaaagacttaacatttaagtaaggctgggtgctgtgacttacgcctgtaatcccaaaactttgggaggctggggtgtacagatcatgtgaggtcaggagtttgtgacccgcctggccaacatggcgaaacactgtctctaccgaaaatacaaaaattaactgggtgtggtggcacacacttgtaatcccagctacttgggaggctgaggtaggagaattgcttgaacctaggaggcagaggctgcagtgagctgagattgcaccactgtactccagcctgggcaacagatggagactccatctcaaaacaaacaaacaaacaagtaagtttttataaacctaagtaattaaacttatacaactggtgaatatcttaaaattctcttaagtgttttaaaaatgtttataaaattcatatgatttcaacttaaaatctcagtctataatcattactcatacattttaaatttgaaacacaattagtctgttaaaacctctagtatgctaacttctcttgaacacaagtatacacagtttgcttctaaacttaaaaaaacaaacatttcagaagagaatgcaatgtgggcctgtgataccagggtgacttttcttatatctttcttatatctgcctgcaaggtagggtcctttttttttgagatggaattttgctcctgttgcccaggctggagtgcaatggtgcgatctcggctcactccaaccccctcctgtcgggttcaagtgattctctgcctcagcctcccgagtagctgggattacaggcaccacgaccacgcctgtctaatttttgtatttttagtagagacggggtttcaccatgttggccaggctggtctggaactgctgacctcaggtgatccacccacctcggcctcctaaagtgctgggattataggtgtgacccgccgcgcccagccgggttctttttttttttttttttttttttaatatttgctttgccattgtctccaaaacacaggctatgccatggtggcataacaattattttgagctgaaggcatttgagaatgagcagatgcaggaagaaacttttgttttctggattcctttgaaagtggagactcccaaaagatctcaactgatataaattctagccctgacagtttcataaccagggaagattggcttttatcactggagacaagtcaacactgggatcaagagatcacctaaacagacattgacacaaaactactatatcttccatctggtcttctaaaagaccatttatctttcctaaaagtcattggttttcccctaagttgtctttctctccctcttctccatgaagacagtatataagccccaaattctaaccaacattttgagtcacatttttttttttttttttgagatggagttttgctcttgttgcccaggctggagtgtaatggtgcgatcttggctcactgcaaccaccgcctcccgggttcaagcgattctcctgcctcagcctcctgagcagctgagattacaggcatgcaccaccacatccagctgagtcacatttttttctgtgttcctacacacacacacacacacacacacacacacaaatacaaatttacacatttatatatgtatatacacatttgtatctttgcttcttgtctgtcttttgtgagtttaattcacaggacctaagtgagtggaggaaaagtttttttctccttgacacctatcaaccatacttagccaacatagttatttgacacattcgtttactgcttcctttcctctctagggccattcctatttttgtacaaaaatacagttattttcccataaaaatttacttagatctcatcggccaccctcttttttcactcttctttgcaacagcattctgtagcctctgacttcaatttctccccttcccttctctctgaaactccctctaaacaagctttgacaacctccctcccactgacactgttctggctgggcacagtgtacatgcctgtagtatcagttactcagggggctgagatggaaggattgcttgagcccagaagtttgaggccagcctgagcagtgtggtgagacccccatgtcaaaacaaaagcaaaacaaacaaacaaaaagacactgttctatttattgtttatctctagcatctataacagtgcctgttataagtgctcagtttatgtttattaagttctgtttctgaatattttttatgttcttcctgtttgttagaattgcattttgtacagaaatttgaatgacatctgaatagattccaaggctttgggaagtatcaccattctagtactaaggctgtgataaccacagatacaatggcagattatacagtttgccaaataatattatgtgtgccttccaaagacccaggctgtcatcaccacattgaatcttgtgaaatagctctaagaggaggtggtcattctctgtcacttactgatttatctatatgaaccttgttagacacacgtcctgaggcaagttttgcttaaatctctgccctatgcctattgatgggagtttttactcccaccaatatggggggcctgcaacttaaactgacaaaagacaggtaacaggtgacaagataaatttgtattcatgcatgtacacagtcccacagtatttactccattactgtgtatagcataaagcatccaaattattattattattatttttgagatggagtctcgctctgtctcctagggtggagtgcagtggtgcaatctcggctcactgcaacctccgcctcccgggttcaagcaattctctgccttcgcctcccgagtagctgggattacaggtgcctgccaccatacctggctaatttttatgtattttcagtagagacgggtttcaccatcttggccaggctggtcttgaactcctgacatcgtgatccacccgtctcggcctcccaaagtgctgagattataggcgtgagccaccacgcctgaccaaaccatccaaattaaaacaggatcaatgttttgaagggagttacacatgtgttttttgttttgttttgttttgttttgttttttagacagggtccgcttcgttgtccaagctggagtggtggcacaatcttggcttactgcaacctctgcctccccagcttaagcgattctcctgtctcagcctcccgagtagctgggactacaggcacatgccaccatgcccagataatttttgtatttttagtggaggtgggggtttcaccatgttggccaggctggtcccaaactcctgacctcaaatgatctgcccaccttggcctcctaaagtgctgggattacaggcatgagccactgtgcccggctgctcatgtgtattaaatgatggctattggccaggcatggtggctcacgcctgtaatcccagcactttgggaggccgaggcgggcagatcacctgaggtcaggagtttgagaccagcctggccaacatggtgaaacctcatctctactaaaaatacacaaattagccgggcatggtggtgggtgcctgtaatcccagctactcgggaggctgaggcaggagaatcacttgaacccgggaggcggaggttgcagtgagccgagatcacacagctgcactccagcctgggtgatggagcgagactccatctcaaaaaaaaaaaaaaaaagatggctattatataaatgaatataagtgaacaaatgtgataagttaaattttgctaggatccctatcccatgccaatcaccaaagggaacacaaattatacaaaggtagggactatgttttgctcatgactgtgtcaatatataatatacaaataatatcttggtattctgggacttagcattcattgttgaaagagtggatgagaatcttggtaatgccagcattttctttctgctcagatgctgatcccactctaacctatcctgtttacaactaattcctagactttttatgatgcaaaattataaaacaaggatggaaggcttaccttaaagagagaagtggagggattttttgtcgaaagtcatatataataaagagtacaaaaaataataaaagagaggagagggcgtaaacactgatcttgctatgagtagaagaaggaacctattttggcgagggtaaataaagggacttatttatttaaagactcactattttttatatttttggtagagacggggcttacccatattgcccaggctggtctcgaactcctgacctcaaggaatccaccctccttggcctcccaaagtgctgggattacaggcatgagccaccacagcccagccataaggggacttcaggaagcctgctgagaatgtgggagatgagagtgaatgttaggaggaagaaagaagacgaaaggcggatcaaaacatctggctgggggttctaaattggattgggcatctaattgtttaatgtctttcaagggataagagaaataaatggcattcttttcattttaatttacttgcttttgcccattcgattatgctttttcttttcttttatttttttgagatggagtcttgctctgttgcccaggctggagtgcagtggtgcaatcctggctcactgcaagctctgcctcccgggttcatgacattctcctgcctcaacctcccaagtatctgggactacaggcgcctgccaccacactcagctaatttttttgtatttttagtagagacggggtttcaccatgttagccaggagggtctcaattactgactcgtgatccgcccgccttggcctcccaatctattgtactttttaaaatgagactcccctccaggctaaacctttctccttttgggctatagcagaaagacctgagctcctcagtgacagggagcgtatcgtctttattttgttttcctgggactagcagagtgtctgctacagagctgaagggtcatgtttcagtttttggaaagtaactcaacttcagcctcacatctactggacagagtgagcttatcttggccctccaggcaaagtcagctgaaggccatggtagagacacaactggttcttctactagtcttcttctagtttgcttattcgttttgctgtatttagctctttataaccttcaacaaattcaaggttttattgcggtataattgatttgcaataaactgcacatacttaaagtgtacaatttgatgagttttatatgtgcgtaattgtgaaaccaacagacagggaacatagcatcacctccaggagtctcctcacggtggttttatttcaaggttttattatctagagataaagagataaggaaggagatagatcaaataggattcttcacgatttgataattgttgaagctgggtgacaaggattcaatgagattcattgtttgaaactttttatatatgtttcaaaaaattcatttataaaagtttttctttttttctttcttttttttttttagaaaaaacttcaggccaggtgcagtggctcacgcttgtaatcccagcactttgggaggccgaggcaggcagatcacgaggtcaggggatcgagaccatcctggctaacatggtgaaaccccgtctctactaaaaatacaaaaaattagctgggcgtggtgggtggtgcctgtggtcccagctactcgggaggctgaggcaggagaatggcatgaacccgggaggcagagcttgcagtgagccgagatttcgccactgcactccagcctgggtgacacagtgagattccgtctcaaaaaaaaaaaaaaagaaaaaacttcaatatgttaactcctattgatgatagaggccactggctcctgtttaaaaaattcaggaaatgtgcatggccagatacttctccccagcaaggtttggggaagcattatgaacgatcttaataccctctcccatgtcaattaaactagtcacgaatgaaaagatacggggattatttgggtgggtcctttagatccgaaattttctttttttttttttgggagatggagtctcgctctgttgcccagggtggagtgtggtggcacaatctcggctcactgcaacctccacctcctgggattaagcaattctcctgcctcagccccccaagtagctgggactacaggcgcatgctgccacgcccagctagttttttgtattttagtagagatagggtttcaccatgttgcccaggctggtcttgaactcctgaactcaggcaattcgcccacttcggcctcccaaagtgctaggattataggcatgagccaccgcgcccggcagatttgaaattttcaaagaattcaagcattatggctttggctaaaaagcaattcatttattatttatttagatatgaggtctcattctgtcacctaggctggagtgcagaggtacaatcttggctcctgtagcctcaatctcctaggctcaaggaattctcctgcctcagccctcctgagtagctgagactacaggcacatgctaccatgcctggctaattttttatgtattttttgtagacacggatctcattatattgtccagcctagtctcaaactcctgggctcaaatgatcctctcaccttggcctcccaaaatgctgggattataggcatgagccactgcatccagcccagatattttaaatgtatatttatatataatctttttaaaaacccatacatgctaacattctatgcacatttctgcattttgcattttcactcatacatctggaagatatttctatatcagtacatataattaaaaaaaaaaaaaatctcattttttaaacagctgcaaataattctagcaaatgaatgcataattgatctaactaatctcctgtggatagacatttaataattgtttgctactggagtcagtgctgcctttatacatatgccttcatgtacacgtgcgtttatatatgcaagatacatttatagaagtggaagtgctaggattacatttataaaatgtatcaaccttttaaaagtacatgcatcaaaatgtttgatacatttttaaatgacaattattgccaaattgctctgtatcatgtctgtgtgcgacaatttacaatcccgctaatgatgtatgaaaccatttgattctgtacacccttaatgaaacagtgtgttccttacactttttatgtgtgcccaactcttaggtcacagtggggtttcaatatgatcttaatttacatttatctttttatgagacatgttgagaattttatcataggaactatttgtatttccttttctgagaactatctgttcacgacatttgccattattttttcttgggcttgttattctttttgttcttgattaatatctggtgggatatttattcctactttttttttcatttggactgttgaattagcttgtttacttctaaaaaaattctactttcattgggctaagttacatttatggtttaattaagaaaaactgacatttcaatgtctcttcctgtatgagaacagggcatatctttccatttattcaagacataaagtgggtttaaacaggtacatttttaaaagatggctacttgtggagtccaaattgagaagggcaagaacgaaagcaggaagaccaattaagtggtcctgcagtggcccaggaaagagatgatagtgcttaggctagggttgggggtggatagatttgagatctgtcctggaggaagcaccaattaaactttctcatggattggatatgggagtaagaccaagggaagaataaggatgatgcctaggttttcaacttgagccattgagggactagtgatgctgtgagatacaggagacagaaagagatcctagaagaaggcttgcttagaagcaaagtccccaagcctcaaactccagggaggctgcccacagaagctctttcagtggagacacaaccaactggaatcaatcaactgtaatcacaaccaaccagggccttcattaacccatgtggtaccttggtgtgaatttaaaaatggtggcttttctgggaagacagaggcccaaaggtacacttggcaaggagtatgcgagttgagttttagcccctacttagtctcttgactgggagctcctgtgctatgagcaacctgcaggaccagacctggaagccttggaactaacctctgactggggcatctgactcatccactcctatacagtactaccctgctccttaaacttaccccaaaatggcccctgactctagtgttctgctactcaggtagatcctcacctctacctgtttagagatctgccagttacagtgaatctgactgctgcctgcttacgcatttcggcagttgccttgcctctcctaaaccttgaatatggtgcatagaataaaatataagccttaagtcatcttggttaccataaatctcagaatgatgctttttcgatacttatgcaattcctattgcccaatttgaaaatgtcctggttcatttgaaaacagtccagttagctgcatagagcagcaagctgtaaattgtatctgaaagaccgctggcttcaaaccattgggattctgagtcatctgtttggtggtctgactttgatcccagcctccagcctctgggtccccctggtctaggtgacacctctccaaacagtgttgagcttactcctcaaaggcagaggacagaagcggattctgaaaaactctgcgttcagtctgacattccctgttcttttcccgcaccttccccatgaaatagcagactcgaaaataaaatttactcatgccctcatgactgactgactacccccaacccagggggttctcccgtccttaatctcctccattttagttataccatggggacttcaggtaggctgcaggagtagatgctggcccacatttccatcagtccttgctagggacagtgttacactgcttggtaattgataaatccccactctgggtgcacagtcccctctccccaactgagctaagatgtgggctattgatgctttcatgcccagcccaaccatgaatcagttgacttccagtcaatcattcctcctcgtacccaccaggaacaacactaacaactgaggcaagaatgcaaagccacaacctaaaagaaaacagacacattgttccatctgatctactgacagctaagacagtcactccatggagtacacaggagattcgcaggctgctgccagggctcattctgttcttgtctttcctatgactttactcaggattccattatcagcaacttcaccctccagctctctccatcctcctatgaaagcctcagggacatagaaataagcttgtctttgtaaaatgtgccaggatctccgtcttagataaaagacgactatgagaaaagaaattatttcattccactatgttccatttgatttctgctttcaagcaataaaccaccatggcttgagatgcttctagtgtttcatggagaattgggactatttccccaacatgccctgctcttcattcctctttgcttcttccctttttgactccttggacccgaggggcgaccatgagtggcgaaatttctgaccagctagaataccaggcaggtgcaggctcttgaagcaccaagactggctcaagagattgtaaatggatcagtcaagtgcatgcaccactgacggccagtcaggagagcttccatttgttaaaaatataaaggacattcctatcatcaagcatcacaattaggcaatctcaaagaaaacaatattagctctacttggcctatgttacatgctctaagaaagtattttagaaaagttttttttttcaacataaatttattgaaggatcaaacgtgttctctttcttggtctctttagctcgtaaagtcgttttggggatttcgtgaatctggcaaataaaacaaaacaccaatgaaacgctgagaaatgattatttcccttatgtattttagcggcctccaggcagacctgataaatattcagcgagtgattagctggtgcatccccacctgcgtcctttgcatagccatgcccgctactctttcacaggcagttttacttggtaagttacaaacgtactggctgcactctgcacctgacagtattgcagtaattagcttgggatgcaaaatgatttctaaattaaggtcctggacttgtaaaatcaagaaagcctgataatcaacatcgtcgctctggtggccattgaataacgggataaatacctaagacaagtcctttaaccatcccacgtggtgataaatgcccgacgtacaaattaaaagtctctaccacacgcaggtgaaataaggtataggtcaagaagagaaggtaggggaaagggtcaatgcttaattatttaaaaatcgctctcttcctcctgtaggaaggtctaggggctaggtcttttagtgcacacgtgatgaaagtgacattttggccaggtgaaacctcaagctggtacaggcagctaaaacacgggcgtcgtgccctggagacaccgggggtcctgaggatggggaaggggctccctgctgcgggtgctgaggggttaggaggtgagcaccgggcgggaggctccggggcaggggctgcgcgtggagcccactcccggacgcgggctcctctcggcccggcacgggtggcgcaggactccgagcccgtcgacaagagagagagcgggagtgggagaaggaagaccgggagaggaggaggccgggcggcaagagcggaagaagaggaggagaactgaggcggaggagggcgagagggaggagagccgggcgcaggaaggggaggaaagaaaaaggcggcggaggagcgcggacccgccactcccggcctcctcccccgcatccccactcgggccggccctcccccggccgccgccgccgccgccgccgccgccgccgccgccgccgccgcctccccttgcccagtgttcccagcaccgcaaggcactcgctgcctcctccgcactcggtccggtccgctcagcgccgccgccgccgcaccctcgccgcacccccgcgcgcgcccggcccgcgcgcccccgccgctcgtcctcgcggcctcgcgctcggggcatgcgcggtgggcggtgccgctccgggccgcctctgccgccgcgagtaggaagcgcgagcgccgggcaccgggctgtcagtgagcctggggccagcgggcgagccagcggctccggctcccgctcccgctccgcgcagcaccagcccgactctccccggcccccgccgcgccccctcgccgcgacctcggccaccggcccgcgccccgcgcccggggtcgccccgagcccgcacctctcccccgccgcccccgcccacccggccctccgcggccgcagctccccggcggaggcaagaggtggttgggggggaccatggctgacgttttcccgggcaacgactccacggcgtctcaggacgtggccaaccgcttcgcccgcaaaggggcgctgaggcagaagaacgtgcacgaggtgaaggaccacaaattcatcgcgcgcttcttcaagcagcccaccttctgcagccactgcaccgacttcatctggtaggtgccgggccgggcactcctgccccgctcctccccgcctccgggtcccggcacccggcgctccggcgcgtccgccccggggctggctcactccgataacttggaaccggcgggagtccgaactcttcgcccggagtgacacgcgcgcccggccctgacaccggcgggcaggactcccgggacgtcgccgtcccgccacacacaccccctggcgcgagagggaggctggccccgtacggtggcgaaggggatccctctccgggccgggcccctcacctccccgggcgcgcccacccgcacgcacccagcggagcggccgcttgccggggtgtgagcccaggggacaggggaggaggagaggccctaagggggcaaaggttcccggagaaacgcgccccggagtaacgggggagcggcggcgattgcactgcgcgcggtccaagttgctggcgagccaggctgggcgcgttcggggtgggggggttgtgtttgtgcttcccatcgggctggactgcgctggcatcttgggcccctgcctactgtaggctgcatctactgggcacggagagactgacttttctgagtgagcagagagagagagagcaaactgttgaaagcttgcagtgggggagggggagttctagcaggcaaatggcacaagggcagagggactcatttaaaatagaccctgtcggccaggcgcggtggctcacgcctgtaatcccagcactttgggaggccgaggcaggcggatcacctaaggtcagtagttcgagaccagcctggcaaacatggtgaaaccccgtctactaaaaatacaaaattagccgggcgtggtggcacacgcctgtaatcccagctactcgggaggctgagacgggagactcgcttgaacccgggaggcggaggctgcagtgagccgagatcgggccactgcactccagcctgggtgagacagagcgagattccgtctcaaaaaaaatgaaacagaccctgtcaactcgagattagacctgtaaccctgttgatgagggcagaggccttatttaagaaaaataatataagggccagaggtcagagatcaggtaatcgccaatgaattcaggcattcttaactcggagggtccctgggggcttatggagaatcgatacatagaagggcttcaggggtctctgaaccctgtaaaactgagggaaattgtgtttgtgaatctttttcctggtgagagaattacagctttcatctgatcctcaaaaggtgtgtgacccttcttcccagatccccgtcaccacacaaaagttttgaaagctggaactaaaggagctctaggtcctctagttagagcagcagtagtttggtttttcttttaagttgcccgacgtcctgactcttctacctcttctttgtggtgtaggaagttccgggcaagacagagctatggctagggcttcttagctccctctccttctaggccagggggagctgcacagggtggcagtcacggagtgaatcctgccaccagccagctgtgtggcacaggtatcttgggccactagggtgagcatagtatggatggctctgtcggaatccatcacacctggggaaaaacatcccaaagggcaggtcccatgatcgtggtgcgaataaggtgtttaatttttcctttcctttttagacatctgctcccaagtacacttttatgaaaagcacagccacctctatgagtgatttccactgtctagtcggcatatgaagcgactgtgctcaaaggagtaggtagtcgtagataaggctatttaaaataaaaatttcggagcatcagggcaaagagaatattgcatttggttaagaggaggtcagctgtgagagtccattaaaagggaacagactgctggtgacttttgcaggaagtaggagagttagaaagggacttgcagcatactgaggctagctattgtctttccactatcagttgcccttgaaggatcagcccctggtgagctgaagaggcgctcaggtcaccaccagtattgtgaagtggaaaatgcccccctgaggatccctgcagcactctgcatttaattgtaaaccaaccaattggaagtcccaggaaaccatccacggggattgtctttttcagtttgctttcattattgcttctacggggtccttgatttacacgtttatttcaatattaaatcactgatatttttaagcgaaatgtttagagttagatatggtttttagtaggggggatgactctaagttaattttaaaagtatgtgaaatactttgtacatgaaacattctatgtgaagcaagagattatgactctcaaccttccgaagaaattttaatgcagttcattctggtagaacaatacctgcaattgaacgtccacgtcagggttctctgcttacagagtaaattctctaaagtcatgtacaagaacaaaatagcctccctatgtgctttgaatgctattggttctcagtagaaattagatcgtggtcatctcaaatgcaaacaataggaattatattttctaagatctggtttcttaagccaacattaaatgttaaaagtgatgccgtttggcagtttctagacatgtgatattttaaacaaaaagaagccactttgttatctttagggagataaaaacaattttcatttggtcttcaggaacaaaataagcaacttccttttacaattttaaccataaactgttttgttacttgaatattgtgttgtagccaacaagtttgaatatacagtcatgttcttgtcttgaaattttagtattgataacatagtataaaaaattggaaaaaaggttgatacatcgaaatagttcagtgatcctttataggcaagatttttttccccccaaggttgaatttacacagtaatctgactagatatttaggtatgtttttttctattaaatcattgggtttcacatacaaacctttagtggtagagtacttggtcacataacttgtttaaaatatgctatccaacagaaaatatgttaagatattttgttcttgtttttgtttttcagggggtttgggaaacaaggcttccagtgccaaggtaagctaccacttttggttttattttcaagcacaacatgaaataagcattccaaacaagaacattatttccagtcatattttctttccaataaaaaaatgttatttagataattttgaaatatgagggctgtaaatttgggccttaaaaaataattggggcctactaatctgcatatagagctgcctttttctcattggaaaaaaaaaaaaaaagcctttctgtaattttattttttgccgagaacattcttgtcagaaactgctgtctttgtgtgggtgttgagaaaaaaatggaatcactttgtattcaagtggcttttcttccttgttcttcctctttgtttttattcttcatcgcttttacttatgtattgagttggactcactgcaactaattttaggccgtatttcattctagtaagggtttgttttgtttagaataccagttgtcatcgagaacaaagtttgcatgttttaaagttttgttgatgatttgatgactgatttctatggtatgactatgtagcatgctttcctttcagcttacatatctgacaaaacgtgatatcagccatcacatacagaaagaaatccatttgcttcaccctctgatctgtaattgcatttcacacacatcgaatatctaactttttgtactctccattctaattgtttgacttttcctttttgaagaaacccactttagagcttgtgaaggcatcacaggctcattagctaacttttctggctctcctgctcattgtctatattgtgtttatttagttctggttccatttcccatctgggcatagatttattattagggcaagcagaaagtacattctagcctggaaaatattatcctaacactgtttaatattaagtgcattagagagaaaggcactgtgtacttttttacaactttgagattgtgctagtaaattggttgccttttaaaaactagttcaaatttgtgaacttgtttcttgtatacattttctaaacatattttagatgggagtattttatggtatgattattcatttaatattctaccttcctttctccaagatgtgcttaaaacccctactgagtgtatcattttcagagttgcatttgaaaatcaagggatattccttttaaaaagagaagaaagagaaagatgtgttataccagtctctacaaaagatgaaaggaaaatgtagctctttctagttctcaaagttgtgggcctgaactttatgggtgagatttgagcctaggcttgaacatgactttagggagtttaaagatgtaaggttctgggccaatgtgattgacatctgttatttttggtgatatttttcgtttgggtggggacttacataaatctataagaaaatttttgtactgaatcttctccatactgcttgtctgggagaaagtggttgtcttgttctaaaacttttatcattttctgcataaataaaaaataaggttgattagaataaggttggttcctcttagacccgctcatctgagcagattttgtggaaatcacagtggccgtattactaggctctagggggttttgcatgatttcccccagagcatctcttgaacttttagtggattagcagattaatagtttcatggcaacataactcccttttacctaaattaaaaaagtgaaacccataaaaattttaaactgtataaaataaaaagtgaaattgcatatgcttctcttttccctcctccagagataacttctgtttgagacaaccattcgttcactcactcacacatacttagtttttaaaaggagatcaaaattttatacgactttgcaacttgctcttttcactcagcagtagatggtggatattcttccacatcaaagcatcagttctgccttactctgcttagtggctgcatgtgtggatgtatccaatttattcacccattcctctatcaaggggtattttgtaattcgttcttactagtacaaatacctttgtcaagagcattattggacactagtataggtatttctacaatagatagccagaagtgtgtatgtgtgcatcttacattttaacgggtgctgctaaattgctcttcaagagttccagtgcacatttttttgtattaatgggacttcctcttcatttttaccagtgaagatatcgggtaatatacatcttttacattttttaccaatctggtaggtgaaaaggggcccctcttttagatttccatctcctgcattatgggtgagcttgaactttttttttcaaatgtgttttagccatttgtgttgtgtgaattgccttactctacctaatatttgaaactctggatttacaaaccagacaaattagagaagtgactatgtgctttctatatagttctttgctttggtgaagaatttaacctcagatctctttaaataatgaattaccctagtgcgtttacaaattacagttcacagagaccttttccaatagtatacatttatttgtaacatgctgtctgcttgttatattttgtttactgtgtctcatctgtatttgacttctagtaggcatatgctagtccattgtattttattgtttgttgtaacttaagaaggatatgttacctcagggtgatgcttttaatcccacaaatatagttacccagcattttctgttttggctcctaccgcaaaattaatctttctattaacatctgactatcgtagagtgaagttttcttttaatgctctctaattttgttttttttttcctcggttttgtttgatagaacatcattcttctgcaggagaataactcattctcattcatacctttggcaacacactctctggaaatgacagctggagtttgaaactgctttttgtattcctcatacatcagattatttttacccgatgaggcagtgctttctgtccactagtatgtagtatgttgctttggttagtaggtaaaatatctgcagcaagcatagtttttctttttttaactagaggggtgtgtatgctcccagtgactcacatattcatgcagtaagtaatatagctttagatccaaaatatttatcttcattttacttagtaaatggtgagtaggtatttgaagactaaagaaataagtgagttttagtccttaaaactgggtttgtaatttatgccatttagagaatggcatcttacaagcatgtgaagtactaaagttatttctactttcatttatgttgtatcttggggaagggaagggcgtttctctggagagacttattggcttattctcatgttcccttcatggactctgtgccattcttctttatattgcaatataggtatacaatcctgaaaactgatattaccagggcaagtaacacaggatcccgttgtcagaatttgctgcctgaaacggtgaaaccaagggccattcttctggggaggagaaagatgagtgtgtagtagatttccaagtgggaaatacttttcttaaggtcctcagagataaagacaagcgtgttccttcacagctctgaagtgaccctttttacatgacttggagttgccttcttatttttggttgaatgtttttttgcttgatgtacccctagcactcatttcatctccataaaactagcagagatctagtccttgcccactttttttttcccccgtcagagaaaggagaagaagacaggaagtagatttgtgtggtatggacattgatgaagttgagtttcaagtctggaaggtctgtttccagttggtagtttctgtcttgcactggctacttccaaagtcagtcatcagagaacagagcgatccactgtactgctcaaatgcactctttctctggggcagtggagctgaaacagtgttatccactgctttcagtactggaaaagggaaagagccaactcgatttttttccccctccttaggcggagcaacacccatgcacttctctaattacagtggtagaaacagcctctcaaaatgtgacctgcctatttcaaatgccaaacagttaacatagtttgtttcatctgcctaacctccacttgttttctctaatttttttttttttttgctattctttgtcttttaatatcacaaatgaaaatgtgctacaaacctaggctctttgatgaggtgaagatactcaagagacagcgtgagaattaagctctgtcagtaaccatgaccaacaggagcctgttgtccctgaatgatcgtcactggattttgaggggtctgctgggaaagaatttacatttttgtgctttcaatgatgctactaaagttgttttgaatcttgagtcatttccctgctaagaacataacacatattgtacttcatctgtgacttcaactgaagctctgcatttttcagtgttaagggttaaaaaatcagctactcttcccctttgatattttgttttgaaggcctgtttcagagaaggtatttgcattggctcatctgagcagggtggtgatttctattccttctgtaagaatgaaagttggtgtttaagggaagaaaaaaaagaatgagtctcctcttggctgtgtgagctgagggattccagaaaacaagactacttaaggaaggtggcctttaaacagaaagggggcagtagcgagtgagtcaccagcctttcagaaaagggatgcgccgttgtcctcatccgccacggtgttctgagagctgagttgtatggacaccaagtaccaggagataggagactgaggtacaagttgggtggaatcatgaggtaggccagattgagcagaggatctgtctgtcctccctatggccaacttgagcagaggatctgtcctccctatgtactgcattgaccgctgcttgcactgtgtggcctctggctgcccgctggttttcaaagttagtgccagggttttccattattctgtcttcaggaggggttcagcccttggtacctcagttttgattggttacccatccccaaattgtaagttatgttaattagagataaactcttggaggtttagttccaaaaagatagaatgcatggaagactgagtataatttgaaacctagagtttttgtagtaatgccaggtcaaagcattatctcagtctcaaagatgaaatggtcagtaatgcctgaattacagagaaaagtggtggaggtggacagttagaactgcctttctgtggttgggtgcagtggctcatgcctgtcatcccagcactttggaaggttgaggcggtcgaattgcttgagcccagaactttaagaccagcccgggcaacatggcaaaaccccatcgctacaaaaaatagaaaaagtagctgggcatggtggtgcagcacccgtggtctcagctacttgggaagctgaggtgggaggatcacttgagcctgggaggtcgaggatgcaatgaggtgtgatcgtgccactgcattccagcctgggcgacagagtgagagcctgtctcaaaaaacaaaaccaaacaataacaaaaaatgctatttttcttttcaacagtgtttttcctccgtaaaactgcattaatacttagaagtagggatggttagataaaactagtgttgagtgttcccatttggtgctatatacttgttataaaatgatttctgattaatgactttctgaattgctactcttttactttatacggtaagtgaaagtgtttcgttaatttattcacacatcaatcctacccccgccaccagaagctggggttgtagcatatggagaggctatttatcctcataggtcgtgaaagccgaataaatgtttacttttgcagataaatctgatgtttgagtttccttttctttatattattttatttttttgagatggagtctcgctcttgtctcccaggctgcggtgcaatggtgcaactttggctcactgcaacctctgcctcctgggttcaagcaattcttctgcctcagcctcctgaatagctgggattacagatgcatgccaccatgcccagctaatttttgtatttttagtagagacggagtttcaccatattggccaggctggtcttgaactccagaccttaggtgatcctcctgtttcagcctcccaaagtgctgggattacaggcgtgggccactgcacccaaccagagtttccttttctttacattttttggtggtttcctgccctccgagtatttcactctcctggatgatactattgaaatttaagtttttagacacattaactcctcacttgctcaattgtttttcttcatgcagattcagagtattccatttccaaatagcattagtttcacagctgccctatcaggataagtccaactccttagcaagacattggaagactcttaaagtctcctgcctgacctcttcagacttacctacaatgctttccttcttcctatccctgggtcattgtgaataagttgcagtttcccagaaagtgcttgtttcaattctttcctcaaccccgtttgcccagatgatatctgtttcacctgttaagtcttagtctaaggtttagctctggtctttcccaattgtcctattctacatgttcttcctatcgtaggaccttttttttttttttttttttgtgagacagagtgtcactctgtcacccaggctggagtgtgcagtggcacagtctcacttcactgcaacctttgcctcctgggctcaagaaattctcatgccttagcctcctgagtagccgggattacaggcacataccatgacacccagctgatttttgtatttttagtagagacggggtgtcgccatgttggtcaggctagtctcgaactcctgacctcaagtgatctgcctgcctcggcatcccaaagtgctgggattacaggcgtgagctcccgcgccccacccttcctatcataggaccttcacactgtatcacctctctacttctgtttcctctgccagttttgagtgcgaggactgagtcttatttctttttgtgtctccagtgtgtaatgtggtgcctgacactcagtagatactatgtaaatatttgttgggtgtgtgattatataaatattaagagatgtgatacaagcattcataaccagaaagatcacagtgacttctgcctggctgccttttctatatttttttaaagcaagtttataatccaaagttgtgccaactaagatcttaggatcattaaagaaaaagtacttttaaagctaagcatacttattcaaaagagggagcagaaaattctacctttatgtatataataagttaacatatgtaatggctaaacctaacacattaacactgcagaaataaaccacttaatgtgtcttctttctatctttagaatattatccaagcatcaagaataaatcttattgcacaaataaaacaagagtgtatcatgggctatagcaggagggggaaaatgtcttgggtatagggtgagaaagtaaaaccagcttttagtacttgtttggtacagttatttaaatgctctattttactttgagattggtaataactggagctcaatcatcatgctccagagggagtagtagctcaacttcactgattctgttatttttaaaatttttgtacctgaaaggtttttgtgcgttaatacattttttgtgccttaatacaaataataaaggtttttgtgctttaatatgcaagtaaatgtacatgaatggcagcggcagctttggagtgaaacagctgtgattatgtttatcatcacagattataacggtgattagaatcactttcaagattttattcaattgaaaggaaagaaaatggatatgtattcaatgctacattatgtcagacatctagctttcatattttatatgctttcattccaaaagcaccccataacaggatgttatccccatcttagaaatagagctaaagtacttaaccaggctggtggggcgtgtcatgggttcagattctaacggttctgcagaaaacattcttcagagccaagtggaaacttttggtatgaatgaagcccggatttatattaggagaggaaagaatgatgccattatgaaacatttcttggtgacataaaattaaggtttcactgtcctcatcagtctgtcaaaatttccacggcagaccctttatttcaggtcttgttttccacccaaactgtgaaatctcatgctaaacttaaggcatggccacttcagtgttggctgtgtctagtagaaattgctataactgcattaaaaaaactctttattaaattatacaaaagggaaaatggtttctggaaatagatttctatcaaggatggaatggaagggaatgatttgattaatggccagcacgagataagaattatttgagagcaagtccatcaagtaagattagcgtaagggcagttcatctttaatgccttctcttgctgttccccctccagtatccatgagcaatagtagatccatctgtcccgtccacggtgactgcagtaggtagttaggaaataaaccataaggatgtaaatatgagacatgagtttagctctgacttggacaagcttcctcaagtttgaggggatgggtcaatgagggtccagttaacagttgaattgagagtaaaattctactgtagagattaactcatggttttaccgtcaggaaaactggtagttttgagttaatctctacgatagaatttctttctctctctctctctctagatatatatatatgtgtgtgtgtgtgtgtgtgtgtgtgtatgtatgtatgtgtatatgtgtgtatatatatgtgtgtgtgtatgtgtatgtatatatgtgtgtatatatgtgtgtatgtatgtgtatatatatgtgtatatatgtgtgtatatatatgtgtgtgtgtatatatatatacacctagcttgtgtgatacacacaagttcgtgtgtggttgtgcacaaagtttatgacgtaggggttttcttatacttgaaacactacaactgatagccagcacccatatagcacttactgtatacactgttctaagcactcacttttaactcacttgatcctcacacaattctgaagagataggcagtgttgtgattcccgttttacagatgaggaaacaggcactgaggcacagggaggtttagtaacttgtccacagccacatagttagaaaatggtggggctgggattcagacctgggcagtatgagtccagatgccatgctgttaagccaggtgttctgctgcctctcacaattctccttttcttgaagttttgtcacacttaaatcacaccattaacttgaatgtcgaggtattaaagaatgaagtgttttttctttttttttttttttctgagacggagtcttgctgtgttgcccaggctggagtgcagtagtgtgatctcaactcactgcaacctccgtctcctgggttcaagcaattctcctgtctcagcctcccgagtagctgggattacaggcatgtgccatgatgcccggctaatttttgtattcttagtagagatggggtttcactgtgttggccaggccggtgttgaactcctgacctcaggtgatccgcctgcctcggcctcccaaagtgctgggattacaggcatgagccaccacgtccagccggaagtgttttttcaattcagtagcacttaatgtgcttcctgcctgtagtgggagcttatggcctgatacatggacctctgtttagtctatgtcatgccagaccctgcagggcgcaggacagaagacatatatgaaaacaacacattgtaacaatacatctatcacgtacattatattacatcttagtctgaatgaaataacagtttttgaagcatgtgggaaggaaggagatattttttgagctcatcaggagatggctcttgttttgggctttgtaggttgctagaatttcctttgattaggaaaatggaggaagctcttctaaggtaagggaatggcatgcgtgagagagggatgagagtgactcacgttccaggagtagtagactgagagagcccatcttatttgggatgttgcccccactgacctccaaatggaagaacagataggaaaaatatgtagggagctacttcatgctttgccacatactgattctttattaaatacatggtttcctcttgtaactttttgttttcatgtcatcattttcagaacaaagttacaaatacagagattactgtatctacatgtagaagatacattgtactgaagcttggaaaataacttcttgtgtttaaaataagcttgttcaaccggtgggccgcatgcagcccaggatggcttagaatgtggcccaacacaaacttgaaaactttcttaaaaaattatgaatttttaaatttttatttatttatttgttttaaaagtttatcagctatcattagtgttagtgtattttacatgtggcccaagacagttcttccagtgtggcccagggaagccaaaagattggacacccctggtttaaaaagtgtgctactttgacacttctttctgctgatctctctactataaggaagctggcaatagtgattattgattatatatagcatcatgttgggagtccagggtcttaccgcatggaaattatgactggagatgagatactcagttatactagatacatgtattaataagggaaaaataaagaactaaaatatttacatattaaaaatcagcagccgggcgtggtggctcacgcctgtaatcccagcactttgggaggccaaggcaggcagatcatgaggtcaggagatcgagaccatcctggctaacacggtgaaaccccgtctctactaaaaatacaaaaaattagctgggcgcggtggcgggcgcctgtagtcccagctactcgggaggctgaggcaggagaatggcgtgaacccggaaagcggagcttgtagtgagcggagatcacgccactgcactccagcctgggtgacagagtgagactctgtctcaaaaaaaaaaaaaaaaatcagtaacactttctattttagaaactgtcaactgatgtattcagtcagaatttctggttcatgatccgtagtttattccttctctctccatgggctaacctcgggctgatgtgttttcaccgtggtcagaaaccttggtaaggaaaggaaaggggtgctgcagtgtactggtatcctagtttggagtattagttttcatctgggattgagatttgagaaatacaagtttacatgatactgctaccatgctactgtgaacttacagtgtactaccaccccatgggtggaaaggatgctggaacagaagctaagtaggctgcccttgtgtgtgactggtgaattgggaagctgtaatttgaaattggggagatttagtgaatgtcttatgtttccattgcagtcgtttttttagttgctgaagctgtacagataagtagccaatccctttttctcaacttatctcttcatttttttccttctcttaggtttctaataaggaatgatttgtggtgctgtttgtgataattggaataaaactctcactggtttagaaagcttggctcacagttgtaaagacttccattagcttccattcagatttatgttgaagttaaatggctgtacactagcttaaatcattttcctccttttgttgaattcatgcatgcaactatacatcctaagtgaatgaactgtcctaaaatgtgaaaatgggagattactcattttttaaaaatgtaaaatattttaacttgattcttaagtatttacaatgtagaaaatagcttaaaacatgactgttaagttctaaatatgaagatgtttttcttaatgctgttatagttgggagaagttgtacatggatgacttaaaatttaataggtgggcttcaaaataagatgatcatattatgagtaatttgcctaacaatacttctgaagttttctttttagtgaacttaattttatcatgtgccaaatttgtttaatactgaagtgacttttgttgctttagtttcacattagtttcttcaatctgaatggcacattaatatggaaaacttctctagaattctgttttaattaaaaaatgaggctttgtttctgtatatcacatagatgtgactttaaaatggaaatgatcgttaattacaaacagtttagaaacatggaggaatgatttttttttaatttttaggtgctaattcaagtttagggataatggctgataggcaccattatccttttttttttcttttttacttattttgtacaactaggcaccatagcacatgctggtattgagctggattgatgtctgtgtgatgcaaattaactttcaagtcatattttataaagctgagttgtcgggctggagcgggaatagttggtatgcttaagacttgtcatggtgggttgggcgtggtggctcacgcctataatcccagcactttgggaggccgaggtgggcagattgcttgaggtcggtagtttgagactagcctggccaatgcagtgaaaccttgtctccactaaaaatacaaaaattagccaggcgtggtggcgggtgcctgtaatcccagttacttgggaggctgaggcaggagaattgcttgaacccgggaggcagaggttgcagtgagccaagatcacgccactgtactccagcctgggtaacagagcaagactcggtctcaaaaaaaaaaagacttgccgtggtggctggcctaagtaggcagattgcttgaattcatgaattttagaccagcctgggtaacacggcaaaaacctgtctctacaaaaaaatattttttgtaataaaattacaaaattaggctaatttttattagcctatagtcccagctactttggaagtgggaagattgcttgagcccggtggttgaggctgcagtgagccgagattgtgcagctgcactttagcctaagtgacagagtgagaccctgtcccctccacccccacccaaaaaaaggcttgcaatggtggtctgccatggtggtctgccatgaatctaatgaaatgttgtggaaggataatttagaggctctgggcttttttgtttaattttctgagtaatatgacaattgaagtatattgctaatgcttttctagatgttatatgttttatttaaagtaaactctggaaaatagaaagcatttgtgattttaattttgacagtatcgtttgtgcacaagttgtttttggctgacttacccgttggtgaagaattattaaaggtcaaagttttatctcgaaattatgaagcacgttattaactttggcttctgttgtatttccagtgtgttcctttttgtcaggttatattttatattctaggtattttatcctgatagcctgatactttttcttatatggagactttttcttagcatgaaaaaaaaatttttttaagtagaatatatttcatgtcagatgagcaaaactttttgtcactaagaagtaactgggtatctcttacatgacattgggttttaatattactaaaattatatattcataggtggtagtcatgcaataacctgaattcatatacttcttttttttttttaattttttatttgagacagagtcttgctctgtcgctcaaggtggggtacagtggtgtgatcttggctcactgtaacctccgcctactgggttcaagggattctcctgcctcagcctcctaagtagctgggattacaggcgcctgccaccacacctgactaatttttttgtatttttagtagagacagggtttcgccatgttggccaggctggtcttgaacacctgacctcaagtgatctgccacacttcagcctcccaaagtggtgggattacaggtgtgagccactccacctgcctcttaattcatatacatttaaatactgacctttgttgaccttcttggtgaatcctgttgtcatagggtcaggaaaagccctgttgttagaattttagagtaagaaaggaccgtagaggctgtctagcccaggttcttgaatttatacctgtagaactggctataagagttaagtgacttgctgtaaaccaaacccccagagagtggccacttaagtctccagcccctacctcctataggatgaccctgtgctatgaacctttgtacttgtactctgtagtcttgactctcaaatgccattcccagtgagtacaagtgcccatccaatactctattttttttttttaaaaaaagaaagcatgagggaatctgcaaacaaagcagacgtgagattccttttattttctttgaaaaacggcagtgccttttagagtcaaatatgcatctaaactctaggagttttaccaggtaaataaggattgtatatttagctttcataatttataggtgaacagtctagtaacaacataaagaactcgtattaaagaatattaaaaatgcttcagacttttgatttgtattggatgagaattcatgggcaaggaagatgaccgttcacgaaattgtatattttttctctctaattttaactctgtgattctctggcaacaggctatacagttctggtgttacttagtctgcaaaaatcttacattgttttcataccagagctgattttgcctttttatatattacctaaaatacacacatacaaataaattactcattagttaatctacaaatgtacatatttttagtagctccctaaacaagatttaaagcttgactaaatgtagtcatggagcttattatttggtagttttgcattctgtagtttatgtaactctatccttaaaattgaaattatttctgagtggtacaagccaaatacagaagtcaaagctttatttttgatagtttcagtgttgttgatttgaggttctgaccttggaaataaagatacagaaaataaacacacaaaatatacaaaataacaatggacatttatgtatgcttttttcaatgtttattttctagctaaatccaagcacaacctaaaagtcttataaatattccatggaaaattttccttcctatgctaggtttctgagttgctttaaaaattagtctgaaacaatggttactttttttctccttggtaaatttccctgggggagtctcttggacattctttattgccctgagtctttgaaccatattcagaatgagaaactgaagacagttggtctgaagatactcggaggatggacagaaatgaccacagctgatttgatatgtatgaataattttgaaaaattttgatagaactcaagtgccaaggacagtttccatgtcgccttctttattgttcctttgtgcctgctatatggatgttattgtcttttttgaataatggcctcccttttcaaataatttagctcactttttaaaaattttttttagacagccttgctctgtcgtctatgctggagtgcaatggcatgatctctgctcactacaacctctgcctcctgggttcaagcgattctcctgcgtcagcctcccaagtagctgggattacaggcatgcaccactgcacttggctaatttttgtatttttagtagagacagggttttgccatcttggccaggctgatctcgaactcctgacctcgggtgatccacccgcctcagcctcccaaagtgctgggattacagggtgttagctaacttgtcttaaaaaaatctttgatagttcccagaatgaagggctgaggggacttgtatttgttccatgaactcagactcatgctatccacatcctgaagtgatcaaaccatccttggctctaacaactggagttctttctcatcattacccttctgaaatctttagaagaaataggtttctttgctccaaactttttaaacttttagttgctttggagtaatgtcactctgggtgaggtcagccttgtcagggtggttgctgagtgcatttatattggttctcattggcagtaatctcatttacaagcatagttaatagaaatggaaggccaaagatcttatgtcattgcctggtctcttaggagagatgaaataggaattcatggagcctcagagatctggaaaagcatcttcctgtagactaacactgtcctgtagaattttgtgtgatcatggagtgttccctaatctgcactgtttagtatggtagccacttgcaccatctggctattaagcacttaaaatgtagaatgaatttttaatttaattcattaaagttaaatggctacatgtagctaatggctactgtattggaagattcaaatttagactatttttaagaaaataaaattctttaaattttttaaagagatggagtctccctctgtcatccaggctagagtgcagtggtacaatcctagctcactgcagcctccaactcctagcctcaagaaaccctcccaccttagccacccaagtagctaggaccacaggcagctctcaccgtgcccagctaatttttaattgtttttttttttttttgtagagatggggtcttgctatgttgtccaggttggcctccagctcctgacctcaagcaatcctgtctcggcatcccacagtagtgggattataggcatgagccactgcacctggctagctttggagtattcttagggagtaacattggatcatattttttaaacctgaatttcattgtaaaataaaacacatacagaaaaccatgcaaaacaaatgcatagtttaatgaattatatgtcaacattcctgtaaccactgcccaaggctaagtagtaaaacttgaccagtcctccatgtgcctcatccctcccaccaaagtaatcactattatgacttttagattcatggcttcctcatgctttttagttttatcacccaagtgataaaacttatccttaggcactatagtttgatcttgcatatttcaaaataattgcaaatgtccttaaatcttttttaaatgatcacttcctcctccatctcctccttttccttataatttatctgggggagtacctgacttcttttgacctgtggagttttccacaatcagaattttgctaattgcatgctcccagtgcacgttaccacattcctttgtattttctgcaaattggcagcttgatccagaggttcaaatgatcagactcaggttgatctgggttatttagtttttaagatgcctttataacttcacatgcttgttaattatgggtctgttattgtggaaagaacaccaatggaatgttttctatcaaggtgtccaaaattgagagcagttagtatgataaaatggtttatgttaaattttgctgtatctaaaatgcaacactgagacatctactgagtgctacttgtggaaaatcagattgtcagaggtttctctaaatgtatttaatatgttcattggacctctatgcagattgagtttttatcaactgcttctgtgggcaagaagtgtgtatgggtatgtctgctggagtggtagaaagaattgctaatcagatgggcacggtggctcatgcctgtaatcccagcactttgggagtccgaggcgggtggatcacctgaggccaggagttcgagaccagcctggccaacatggtgaaaccccatctctaccctaaattcaaaaattagctgggtgtggtggcacattcctgtaatcccagctactgtggaggctgagacagaatggcttgaatctggtaggtaggtggaggttgcagtgagctgagatcacaccactgcactccagcctgggcaacacagcaagattctgactcaaaaaaaaattgctaatcaaatcgttatagccatttacttgtctaaacttcacccacatgactgtacataccatcttttttttttcctggtcttttaatttccaacacaagattaaaattgggttttagttatttttgtgcactggaacatctggtggcaaagaaagcaggaggtgaattgggtgtgttcctgtttgaagaagcagatggtcaataacacttggacctgctgtgtatagaacttcacataaacattgatatggagaaagagttttcataaaaattagcctctttactcttatcagggagtttaaaatataactagataaatatgacttagatacacaaaatactaagggtgcttttatgaagaaatataggcaggcatcagtggctcacgcctgtaatcccagcactttgggaggctgaggcaggcagatcatctgaggtcaggagttcgaggccaacctggccaacatggtgaaaccctgtctctactaaaaatacaaaaaaaaaaaaaaaaaaagctgggcatggtggtgtgtgcctgtaatcccagctatttgggaagctgaggcaagagaattgcttgaacctgggaggcagaggttgcagtgagctgggattgtgccactgcactctcgcctgggcaacagagtgggactctgtcttaacaaaaaaagtcaacatttataagttaatatataaaaaaaatttgagagactttccaatgtgataaaaaaagcagtagactggaaattaggtaatcttgatttgtctccagtttaggcctttgtcctcatctgtgtaaatgagggaattagactctagtagggatagcaaacatatgacattcttgccagatactatggcagataacactcattagtcacggtcttcattcagcttcagaattcttctcaaatttagggctccagtggccattacatattggttgattggaactgacatgggagacaacaatttgccattcctaggctacatcctttccaagtcccttcctagctacagatctcctctgtgaataaagaaaaatccttggaagctctaaattaccctgctagtcagtgtttctataacatatttcccccacttcttttaattcttccctggaagtgcagcatctcagaaaaacaactatgccagtaaaaatttttcctaaaaatgttatccattgaaatattgaacatttcatccaaagcaaaccattggtcattgtggattggccttaggccagaattgagttggtttagaatgggttggggagtgggggaagccaacaatcctttttatcccttgatgttatttttctttattagcagcatgtaaaatgttaaatttttctaatttttgttgggcccaagccgatgtttattacattcaatttatgggaactctttgcagttgaaatttggtatttgagtcacgtattgctttcatggtcttttacagagctctgtgacccaagtagtcactctgttgcctcccgccccactttaaaaaaaaatctggacaggaaataacaaaatactaggagtagacttgtgtttgaccttataggaaccataattaagggtgaaatagtgggatcctcaccccagcaatgcttgatgatagtaggggtagagtgtcctattcataaatccacaggagagaaagtcatgttggaaacagcaagtcaggaggctaatgttcctaaaaaccctttgagaacagggtgtagagaagagagaaaaagccctaaggggcgggtggttgtgatttattgaaagcttactccgaatcctttgagctacctagagagccctaggattactttgagtttataggactgcaagcttttgcatgcacaactcctatttttgaaaatttgacctttaaaatgatttcctttcctgtctcccatccctctccacctttcccccttttaaaactggacttttgtgtaaagttttaggttttagggttgatgtgaaggccctaagacctccatctatgagtggctaccatccattcacacacctaaaaattatttagcaggtaccgtactagttactaggaataaccggaggacctaccatttgttgagaaccccctttgtgtatggcccactgttaggcactttatgtagatatcttttctcatttaatcttcactaaatgaggacagattattttctggatgtaactcagatttaagtgttgctcaaatcacactacgtgactgggttagtgtttgaatgtagagcttcatactcgttcattttgttttttctcatgacatggatttttgtgacatttcataaaaaaaggtttttgaaaggtaatttctccgtgggtttgcatatctttaaaagcaaatgttgtcttccctgccctctgccctcactcacccgtaataaattgtaaaaatctgtctgtaagagcatgctctttaatttcctgtcttatatcctggtggtatgtgatgatataaaacaagtgtggctgagcctggcaaatttataagattgagaaggtttcaaagatgcatgaaaatgggtttacgtataatcaaaggttaattcaactctaacactttacttttgaggagcatcctcttttttgtatccctacctggggatgagagctgctaggagcgcagacaactcagtaattgtgtgcctgcctcatgcctagtctgttcatccttttgagctgtcaagatcaattatgttgaacatagccagagtggggtgtagtctgggtacagactcagcttttcttggcattggcagtatgtgacttctgtatctgatgtgtccatccaattcatattttggaatttacttagatatgcctcttattcatcagtatttgaaaattcttgataatctaaagtttgatccaggggagatttgctgaaagtgacatcaaacagtacctttgttttacttttaataatggattcatgtaaaaatcaccaggcatggtggcagacacctatagttccagctactcaggaggccaagatggggggaatcacttgagccctggagttgaaggctatagtgagctatgatcataccactgcactccagcctgagtgaccaagtgataccctgtctcttaataataattaaataataggccaggcgtggtggctcacgcctgtaatctcagcactttgggaggcagaggcgggcagatcatgaggtcaggagagaccatcctggctaacatggtgaaaccccgtctctactaaaaaatacaaaaaattagctgagtgtggtggtgggcgcctgtagtcccagctacttgggaggctgaggcaggagaatggcgtgaacccaggaggcggagcttgcagtgaggtgagatcgagccactgcactccagcctggatgacagagtgaaactctgtctcaaaaaaaaaaaaaaaaaaaaattgctgggtgtggtggtgtgtgcctgtaattcaagctactggggagactgaggcacgagaatcactggaacccgggaggtggaggttgcagtgagccgagatcgcgcccctgtactccagcctgggcgacacagtgagactgtctcaaaaataaaataaaatttctggatgtttctatcgtcatgtgctcccgtaaccgccagctatctgacatcaactctgtaaacttcatgtcctgtgtctccttcgtccacatgacttacatttttttatttcaattcatcttttctgctctcatctctatttctcatctttttgaaatttgtagtcatcagatagcttttatttgagtattaatatgacaagtttagaggagaattatttcacagaatgaggtctgaaattttaggtgactattcaacagattttttttccctaagcattcatcgtcatatctgccagccacggtgcctgatgctggagatacaagtgagcaaagctgagactacctctgctggaatccctctagtgatggacccagccactaatctgaaaatcatgtggacaagtaacaaaagactgcatatggagttaccaaggaaagcactacgggattttggcagtgtgtaacaggggacctaacttagtctgaaggatcaggaacgtctctcctgagaagataacatttttccctctgttgcccaggtaagagtcagtggtgattgtagctcactgcaatctcaatctcctgggctcggtcctcctgcctcagcctccagagtagctgggtgttaacagatgcatgcccctatgcctggctattaaaagacaattttttttgttttgatagagacggggtctcgctatgttgtccaggtcggtcttgaactcctggccggtcttgaactcctggcctcaagctatgatcctcctaccttggcctcccaaagtgttgggattacaggcatgagccaccatacccagctggaaataatatttgaatgaactctaaaggaggaaaggagttaactgattgaaaatgaaaggaaaacccttctaggtaaagcagccagcaactgcaaaggccctaaaaggggaacattgtgtgttctagaaactgaaggcagaggctgggtgcggtggctcatgcctgtaatcccagcactttgggaggctgaaatgggcagatcacttgaggtcaggagtttgagaccagcctggccaacatggggaaaccctgtctctactaaaaatacgaaaattagccaggcatggtggcacgtgcctgtaatcccagctacttggcaggatgaggcaggagaatcttttgaatctgggaggcggaggttgcaatgagctgagatggtgccactgcactctagcctgggtgacagagccggactccgtctcaaaacaaacaaacgaaaactgaaggcagatctcatttgctggagtgttttgaatgaggattattatggtgagaagaggctggagaggtaggcaggagccaccttgcaggtcttagtccatttaatccgtgttaaaaattcagtgctttagcccaagaaccatggcagtctttcaaagggctttaagcaaggaggtggcctgattagtgtctccttgtgtaggaggatcatgcctactgttatgtgaagaactaactagaagtgggcaagaatggatggggcagcctgttgggaggtctttcctcattctggtgagagacttggttccagaaaccagagatgtggtggaggacaaacgtttgcaaatccaggatcctttttaggaggagagatcagctggacatgatttggaggtagaagggagaggagggtatcaaaggtcagaggactgtggtgccattcactattacgtagcatgctagaggaagaccaggtttcggggaagaccatgtggttttaaacttgctgaatgagaagtgccttagaggtctccaagtgtatggtacagggactggggcagagggtgatgccgggaaggcagctggatttaggtgctggagctgagagaggcagccaggactggagagtcatctgcttacaagttaagttgaatgaatggcaaggatttgagtgcctggaagaaggcacagagagaaaagatgagagggctgatggaatcagtatagtttagtcatctacggagatgggaatgaacaagagagggcagggtttgcccagagaggcaggaacaaaaccaggagctgtggtgttaggaaagccaagagaagagagaattttaagcaggaggtccctactgccataggtaggacaaggtttcaagacaggagctgctctgatggcctgtggaggttggagcttcatcgtaatgggcagagtaaaggaaatacctctgcagccatctgagcagtaattccctggagagttaccaaggattgttcagtcaaacacaccccgtcatttatctggatagttctatttttccatacattgtctttgatcgaaatgtcgatcttttttcaaccagccgggatgaaaatggtgtgaatcgtgttctctctctttagaaagaaactgataaaattgggttttctttgttcttccttttattttcatccattcaatacctagtcctcactgagctggtcttactcaacccattccctctgctggtctgttgggtactaataacagatggaaacaactgggaagataaactattttcctggatttttttttttttttttttaaacagagtttcactcttgtttcccaggctggagtacagtggcacgatctcggctcactgcaacctccacttcctgcattcaagagattctcctgccttagcctcccaactagctgggattacaggtgcccgccaccacacccagttaattttttgtagttttagtagagatggggtttcgccatctcggctaggttggtctcgagctcctgacctcaggtgatccccctgcctctgcctcccaaagtgctgggattacaggcgtgagccatcgcacctggcccctggagataatattgatatgtgactcagggaggtaccaaacccaactgttgccccctttcctttatttacttatccaggatatttatctatatctgtaaaaggatttattattttttagaatcgtacagctgtaatgtctattcatcctgtcagaagagataaagcggatcagtaggcaagcatttgttgctgcttgagagagattttattaagctaaaatattccattagactcaactccattttcaaatattttgttaagagggtctcaggatgactgtaggaaaaaggtatttggaagattgtgtacactgacaataactagattacaaaattttataaattagttaagatggactttaaaatagcaacaggaaaaacaattttggacttgtctgcgagtgcgagtgaagctgatagtaatgagatttatgggttctggccctgcagggatcccagtagggatgaataaagcacatgcctgctagtacattcactgattctgctcttggatatattatttacttctttcctcttttagtaagactttcatctgtattagtaattgttctatacttttaatctctggagcaactccataaattaacaaggggttgtgtctaagatgatgctgatagccctgaagatgttttatttagtgcttttgggatgatgtgcagagatgggatgtcagaaggaataatttggaatcttatctccctgctccttggactcatgttatcaggggaagggagcttggggatgtggctgtcttagctgtgtcctctgatggcctcatctcagtggtttgggttgaaagactgtatctcgtgcttcctgtcccatcaacctctcccttcgtctgtttttctcttctgtgtttaagtataaacagaacccctttgtacctctcatctctttatcttctgaagactctgatgtggctactatgctctcccatttggttaatgctactttaggtatttagtatctttatacttttgttgtgttagttgtgatcagcaaagttctatgctgtagcaacacattaatctgcagatctcagtggcttaacactacagaggtccacttctcccttgctgttcatattcattgtgagtcggtaccgggactctcctctgcacagacttgtaggatctcagtacctagaacctaaggccggatctttcaggagctggggaggagggactggaggatctctcatgggcttttcattgcttcagctcaaaaacacttccactcaaagtcattgggcagagaaaaccacacaacttaattatcttaagaggtggggacaggggaagtggagcgaccgagagaagggttggaacatacagacataagaatgagaaagtcttacgagtgttctggtctctgccccatctgtattatctttgtttctgggaaggaaatttctgacagctgtgttgctagcataacctcttggttggtaaatgcattgctgtagacttttccttgatggaaactttctccaagacaatataaactacgcattgtctctttcttgttaaaccacttttttttacagtttattttttcgtttgctgttgaagatttgatcagtattttccttttgaatccaatggtagcaaaccaattttttttttttagaatatattaaggcaaaagaaaacaacttttaccccattcataataggatgtataaaagtaatacctcttggaatagaccatgggaattctggtgatacctagggcatcttatttgataaaatattttttctttctttccttctttcttccttccttccttccttccttctttttttttttttttttaaacagagtcttactctgttgcccaggctggagtgcagtggcacgatctcagctcactgcaacctctgcctcctgggttccagtgattctcctgcctcagcctcccaagtagctgagattacaggcatgtaccaccatggccagctaatttttgtatttttagtagagacagggtttccccatgttggccagggtggtcttgaactcctgacgtcaggtgatccccctgcgtcagcctcccaaagtgctagggttacaggtgtgagccattgcacctgactgaaagtattttcaaagcctctgctatggagtatagtgtgagatgtggagaagctgcagagggaggggcacgttagcatctaaagactctgttgaccatcatccacattaggtccattctaccattttctatgaagtctaaaataggttcctgattattttgtttttaattttttttttttttgagatggagtctcgctctgtcacccaggctggagtgcagtggcatgatctcggctcactgcaagctccacctcccaggttcacgccattctcctgcctcagcctcctgagtagctgggactacaggtgcccgccaccacgcctggctaattttttgtatttttagtagagacggggtttcaccatgttagccaggatggtctcaatctcctgaccttgtgatccacccgccttggcctcccgaagtgctgggattacaggcgtaagccaacgtgcctggccggttcctgatatttttaagggatttgtttgtgatttaagaatctggctattttataggacgcttaagtgttctttgtttaaataaaattaaaacttcaaattttcctttacaaccatttgaccagttacctctgtttcatctgccatacatggaaatagctttcccagagaaactgacatgaaggcatgcagtctactacatcaatgacatctacattacaaataatttaaaaatagtatatgaagcagagactgggtttacctattagaaaatctaacaaactatagcaaataagcataatttttaaggaaaacagatccctctaaatggtgcaaattttatattaatgaaagaactcaatctttaactcatattcttgttatagcatgaatgatcaagctgttttctgataaatagttcaaggataaagtggtctaatttgaataatgggactttattaggggcatctgcattaacgtgatttgaagcacatgtttgtatgctcactcagttgccttttatataattacattctttatcagttgttggtaaaggttcacttcattttaactagttttcaagttctgtcaggggagagaacctcttattccccatgccctgtgcttgtgaaggggtctgggctacgtaaatgggagggagtgagactgaaggggattaagtcctggcctttgcagttctgttgtcagcctcccccaggaaccagtgcctgactccttgggtccatctgttccgagccctgacagacaggacaagtagaagtaggtctagtctttcttcctactggagggtaacttcggagagtctttaggatgatgctcttcattgaaacctgggggttatactttttaaaaaaatgtgtttcactgtccccttaccctctgattatactagtcttgtgttctttttagaacacctaatataaagtgtaaaaaagtgcaaataaagtgtaaaaaagaggccgggcacagtggctcatgcctgtaatcccagcactttgggaggccgaggtgggtggatcacctgagatcaggagttcaagactggcctggccagcatggtgaaaccccatctctactaaatatacaaaaattagccaggcgtggtggctcagcctgtagtcccagctacttgggaggctgaggcaggagaatcgcttgaacccgggagttggaggttacagtgagctgagattgtgccactgcactacagcctgggcaacagagtgaaactaggtcaaaaaacaaaacaaaacaaaacaccaaaaaaactgtaatatagtataaaaaagaaatgaagttacacatgatcaagtcatctctgttaatcttttgttatactcttctgtctttttaagtgtgtgtgtgcttatttttttttcctcatgttacaaaaatacatttttaggtcttttgttaagaatatattgtgataactcaatttaaaaatgggcaaaggacttgaacagacatttctctaaagaagacatacaaatggccaataagcacgtgaggagatgctccacgttagggaagtgcaaatcaagaccacaatgagatactgtttcacacccattggatggccgttaagagaatagaaacaagtgttgagaatgaggatacattagaactcttgtgcattgctggtggaaatgtaaaatagtgcagctgctgtagaaaatggtatgaaggcttctcaaaacattaaacatagaattcctatgtgtcccagcaattccacttctgggtatctgcccataagaattgagagcagagacttgacagacatttgtacacccatgttcatagcagtattcataatagctgaatggtagaagcaaccctgtgtttgtcagtggatgaatggataaacaaagtatgggaacacatagagtggaatattattgagccttaaacaggaagggaattctgatacatgctgcaatatggatgaacttcaaagacattatgccaagtgaaatgagccaataacaaaaggacaaatgtatagtttcacttacatgagttatacatttcatgtataacttctcaaactcatggagacagaaagtagaatggtagtgggctaggggtagggggaaatgggaagttcgtttttattttcattttatttttttgaggcagggtctcactctgtcacccaggctggactgcaatggtgtgatcatagctcatgacatcctccatctcctggctcaagccatcctcccgtctcagcctccgtaatagctgagactgcaacacatgcaccaccatgcctggctaatttttttgattttttttttagtggagacgaggtgtgactatgttgcccaggctggtctcaaactcctggcctcaagcattcctcccaccttggcctctcaaagtgctgggattacaggtgagagcctctacacatagtgggaagttagtttttaatggtagttccagtttgggaagaaaacattctgcggatggatgatgatgatgattgcagaatggtgtgagcgtagctaatgctgtagaactgagtacactccagcctgggcaacaagagtgaaactccccccactgcccaaaaaaaaaaaagaactgtgtgcttaaaaatggttaaaatattaaattgtatgttattgcaatttcagagtatattgcgatcatttcccacattacatatattttgaaaatgtgtttaatattccattttgtagaatatcttttaccattttatttttagccactgtcatttttctgtttttcactaatgcgaggaatactatgatgaataacctcgtttatcaggtttttctttatagataattacttcaggtaaattcctaggggtgagattactgggctacatagtatgaacctttttaaggctcttgatccatatcatcacattaccctcagaatagttactaaatttcatttcagccaagcacacttccaccagcagtgtatgagggtcagctttcattttatcttcccagacaccatgtgttatctttaaaaataaattgcctgttaagctaaacaatgatatgtcatcattgtttcaatttaatccatttttattactgatgacttctgttttttttccactttcattaatagtacctgaaatatagggagtgcttcatatttgttgaatgaatttgtcaagtatctactaggtgccatatccttttatagatgtgtgggacataatatcaaacaagactgaattatattatacttctctcactgtgtttacagtctagtggaggagtcaattaaacaattgataggtgctatcagttgaagtatgcttgacatgcaaacaaatattggtgatccctaacccaacctgtaagagatggggcttctgtaaggacgtgatgtttaagccaaaatctcgttgaatgggaggcatctcaaggattctccttccaggggatgaaatggagctcaaggaagaaggaatgtttccagaagaaaaacctcaagatgtaaactaaagttggccatttgtattttttcttataggatttggctattcattgtgctttgctctttttccccctctcctattggcttaagtttttttggtggtggtgggggagtaatttaaaagtacctgttatatagtaaattattaaacatttgcctatatagtaaattattaaacatttgctattcatatataatgttttacccttctctggttaattcgccacatcctgaacccctgcaaataagtttgtgtgtgtgtgtgtgtgtgtgtgtgtgtgtgtgtgtgtgtgtgtgtgtttgagacggagtttcgctcttgttgcccaggctggagtgcagtggcgtgatctcggcttactgcaacctctgcctcctgggctcaagtgattgtcctgcctcagcctcccaagtagctggggttacaggcgcccgccaccacgtccagctaatttttttgtacttttagtagagatggggtttcaccatgttgaccaggctggtctggaactcctgaccttaggtgatccgccctcctcggcctcccaaagtgctgggattacaggcgtgagccaccgtgcccagccagacgtgccttctttattgatgtaggaatctgtttaattagatcatttttttcctccgcagagtcaaactcatagtcttgggaggaagataggaagggggcaggcagggaggttacatggggactctgagatgtctgagggtgaggagaggatgaaggcgaggcaaaggaatagatatcgttggtgatccgctaaggacagtgaccttctcaccttatctcagtcctcaacatgtaaagattttcctccattttacaagcaaggaaatcaagtttctaagaggtaagtattgtttgtggtagatctaaggttttgttttgagacagtctcactctgtcatgcaggctggagtacagtggcattatcatggcacaccacagcctcgacctctcaggctcaagtgatccttgtgcttcagcctcctcagtagctgagactaccggtggttgccaccatggccagctattttttttttttaagagatgaggtttcactacgtttcccaggcttgtctcaaactcccggtcttaagcaatccacctgccttggcttcccaaaattctgggattacaggcatgagccactgtacccagcatggatctaagttttaaacctggttgagctaataggaaaacctaacttttaaacttttaataatatacctcaatggttttttaaagggaagtactggaaaactggatgctggctttttgacttctctttgaatattaaatgagcttgactccatggaattcttgtaatcttaaatgccaaagctttagaccataaactaatcactttgtggctttctataagtcaaaaagccaattaaaaaaaaaacttttattgctaaaatttgtaaccagtatggagatttgtgtgtgtatgtgtgattgaacctgggaatcttcccccccctccgccccccttaatttccaattgagtagtgattttttgtggttggagaggtagttttaacccggtgaattcctctagcggttcttgctgaatgatttcctaaggcattttgaaaatctcttgggtagtgcttttaacctggcttcacatttcatctttctttattcagggagtgtttggattttacaccatgcttgaggctgccatgtctcggctgcaataaccagaaaacattggttttctttggtcactgaccaagcttgtcactactcatttctgcctggctctagactgaagacttcagtccaattttccgaatggcctcttttgacttactgtgcaaaacccccactttggctctgaaccattctctgaatattagcataagcacctaatgctgcttgactaaattgtttctgttgagagagggggatgaggaaaggctggcacggggaacatctgttagggctgtaccttttcattgtattaatttttctgacttctgggattattttcattatgcaactcttcaataaagcaaatttggtatgataaggacttaacattcccccccactcattttaaacatatggggtttccaggctgttattcaaagctgtcctacagactaaaatttaaaatacaagtgaaccaagattctgcagctgaatctgggctttgaggagcctacagtgggagaaggggatgaaaaaaaatattttgtggaatgtactataaccaaccaataagatgtttttgctattttaattggctcttcctggcaggagtttcatacagcggtgtctcagacactgaccaaatctgtttatggtaagtcatttttgtagagaacaacaacattcaacaggctatggtatcactccatttggaagtatgtttcctgatcttgaggtcgtagaagaaaatgacaggaacatacttgtgcccacacaggccctaatctgtcttgctggcattccttagacatttatttattgaagagtccttgtgtctatattgaggggagaaactagataggttaaggaatggatgataactttgattctgagagctcttgcgctatcagaaggaatgtgattgacggtgcttgaatgaaagggtaactgttacagtatcaaccaagagatagaggatggctggttttggaagctgacttgcaacactgttatatctggagttataaccttccagagtgttacaaagtttccagtctattcttcctatgtctgccctcagtgagctagcattgagattcggctgtttatttgcagaaatagttaatctatctttcttttaaaattaacgccttctggaaacagtggctcaacggggaaatgaactcttcactaaaatctcacatttcttacgcttccacttggaataagatccctctcaacacaaataatgtttaatttttttaaccactctgaagctaacttaggtttaattttagtttatgctaaaagtttttcttatgtgactcctacagttttcctagagttattgaaaaaactgctcctataaagcaagtttagtttttattctgttcattttagatccttaatattgttctttcattactacttgaggggaatttaaaaagaaagaaatataacagctgttttgaagtacatttgaaaaatggtaaactgcagaatctgttgcttttccttgactctcttcactctcccccaaagacctttaaatagaagctgtttccttttgctgcattaaccccaaaccctatctgatttcttccagttgccgagcaaacagtggcagcttgcctctgaaggccaccaaaaaggaccaaaatgtttgcatggaaatggcaaccaagaaacccctaatattaagaacctaccttgaaatctgccaattaatgaatggaagcttcatcagattttcaaatggcttttataaaattatataatggaggtgaaagtgaaaggtctacactataactcctattacatgagctaaatgtgtaagccttaccatttgatgtgctcttctaggcttaacagtaaggaccattttggagttaaaattgtgtggattagttctgtgttaaacatgtcttcatctcatttatgtattgtattaaactctttggggaaacagataaaaaggacattttaggctttacaaacacgctacacaccataaaatgtttgtttcagcccattgcttactccaaagcaatggccttttgcttgaagataatctcaataatagaaaacagttaccaaaggaactaggttttgggtggacgacttagccctccacaagggactgcagaatcctggtatttgaactggcagggtgtttggtttctttttttttttttcttttttttttttggcttgtttgttttcgtttgtcagaatatggccccagtttggtttaagttttgaatgttcaggaatttctcagagcagacaggggtccataagggcttagtagtgcttctactgtgcaaacagtgatttcttttttctccaaaaattaatttggcgtaagtgtgatcatggctgcttgacatttttttgttttgagatgggagagcataaaccacattcaaaggaaaaattagagcctatgtattagaatatttaaactgcttaatgtagagcaaaggaaaatgtcacaattggatgctgttgtgttctaagcaagcaatgcttctctggatttggatacttgagaaatcctttatttagaagtcattcatattcatctttaatacagcaactgtgaatatcattagccagaagcaataaattttgtgaaaattatttggcaattgagaaggtagggtagccagttgaagtcctgtgggcccaaggaggaacttggcagtgagttattgtcaaaagctgcgagtgccaggagtcagcccaaggagagttctgtgggaatcagaggagtgtggggccagttgagtccttatattatttattcctgcaagcatgacagattgattattacggatctgaaaaatcacttgcatgggtcttctcattctttttcacccctcttttctttctttttgggagtggataagacttaaaaaccacatacctcaggatacattgccgaatcaaaatttttctgatggtcgcagacttccgtgtctagaaagctgctagctttctactatttaaaatacaaattttgggatatggcaagcctcaccatttcttcactgtatgtagtactgcttgctgggcagcagacagtaaatattaagtaagctcttcaaaatcagtttcattccatcagagcatggtgacatttttttcccctgcttttaatctctaaggtgcaaattttgagggatgttaagtaattttaaaaatttatctactgtctttgtgtttgctgtgagatatctttctggagatagaaaattaagtgaggcgtgttgttctgaaatctgggtgccagtaattcttgcatcgtagggagctgtgccttgcactgtgtatacatgtcaaatctgaacatctcacctcgaaagaagtttgccaaaaggtaaaaagcacttcccaaacaatcctacggttttgagtaaggagtactcaaagaaagaaagggactgttttcagatgtttcataaatggtaatcaatcactaataattaactaggtacttgaccatgcaggtatgctcccagcacagtgcgatagcagcttagaatttgagattgaacttttaccctggttatctttagaatactgtttctctttcatttatgtgaataaacatgtattttgcatgttactgtaaacatttatatatccttatacctttgcagtttaccaagaaaggcttataaaattgtgataaagatttctagtgaattattttcttacagctcttatgcaaggaattcaagatttttgtattatcctgagtcatagatataagtggtttgataggttataagctatcttgacactgttctgcatttataaattcagccattctgcaaatgtttctggagcacctgctgcacacagacaccaaggacacaccagcgactaagtcagttgtggtccctacttttgagggagtgttgaagtctattcaattaaaagccaaatcatggcggggcgcggtggctcatgcctgtaatcccagcactttgggaggccgaggcaggcagatcacaaggtcaggagtttgaaaccatcctagccaacttggtgaaaccccgtctctactaaaaatacaaaaatcaggtggacgtggtggcgcatgcctgtcatcccagctactcaggaggctgaggcaggagaattgcttgaatgcaggaggcggaggttgcagtgagccgagatcaggccattgcactccagcctgagcagcagagtgagactccatctcaaaaaaaataaaataaaataaataataataataataataataataataataataataataataaattcagagatggagaaaactttgggaggcagggtgagcatctgaacctatttgaatgtagatataactaatgccaagcaagggaattatggggacaggacagaatgtcaaagttatacacctagaaactataaaaatagtgtaacagagccaaagtctggaggcagagagaggaaaagtaagagaaggtataagcatgctggtgtccacatctttgatagtagatttaactgattctgtctaaaacaaaagcattgttcaaaaaaattgcttcagctttttaaatattttcaccatctcttaatctgaaatttcattaattttattttgttagagtcaagaaaaattatatcagaagtgaaaatagcatgtggaacatgttcccattttcataaagattacttgtcatccatccttgttcatagaaagatggctagaatggtttttgcttagtgttaatgatattatttctgtgtgttggcatttgagttgatttatttttacatttgtctttctactctgcattgcataaattctctatttctttttttaaaaaagaagcataatatgccaagatgtttaaagtagataattttggatgttgagaacctgaataatttttttttttgtagttttaatttccaaaattaggggagagggagcatcttgtttggtttaccgtgctgaccataggttatatgtcattttatgcatataagtttaagtaatttaagtaccaagttactactagtacttgatttcctaagttgctgggaatatacactgtgggctgttcataatttttggtacttaatccatttcctctctgccatgcttagctttttctctatcactttcttccccccttgtctattctggggccatatcactctttgttatccatcactgaatggcctaacttcctttcaaacagagtttccctcatttggttggttttcggttttcatggaaagctattgaagtggtgtaagtgagtatggggtaggggaagctggttttgttatgatcaggtttagaagttcatttggcctgctgtgcagagaccggattggagggagactggagtgagtgagactataccagttgggtactgctgaacagccatccctgaaagtgatggcgacttggacggaggaggtggggaggtggacttaagaggctgtacttgaaaaatggactagacttagtggaagattagatataaagggggggttgaaggacagggagtatccagggtgacttgtaggttctgagcttgcacaataggatggatggcaatccatttgctgagataaggcatgatggaagaggaacttgatgtttgtttatgtctgaatcatctgaatcatgaggctggaccaggtgaccttgggcttcattttaaaattgatagcaccatgatgcctaccattgtatgttttcagtgagggctcatgagtgggtgtcttgggccccatccctccctaacttagaggaaaaaaaaaattgtcagcagcattttctggggagaggttccttccatatttttcattaggctttccaggggggccttggctcaagaaaaattaagaaccactgactaagtatgttcagtcacagtgaccattcaataaataattgtcataggctcgtaaagcagaagaacagtatcgatgaatggaaatttcctattcggcattttagaagggagtttgaagtgctcctaggagccattttcccagcatggtcttttctgaccacctaagaccaaaatgatcattcagtctcttaattcctttagcggtaattgtgcatgtactatttcttggctttatttttatgtttttttgactatgctgtttagcttttccaatagaaacagctagctgtgccgggcgctgtggctcacgcctgtaatcccagcactttgggaggctgaggcgggcagatagcttgagctcaggagcttgagatcaggctggccaacatggtgaaacccatctgtaccaaaaacaaaaaacaaacaacaacaacaacaacaaaaaaacagttagttgttattagcctatccccatgctggctaagttacataatcatccctgtaaagttagtgttggcatccttattttagagatgaggaaactgaggcttagaaatgtaagtaaatggtagctagtaagtggcagaactgtgatttgaatcaaggctctttgactccagagctttctttttgtcacagatattgacaagtcctgctggttggcagaagtcatacctatactctacttttatttattttgagatggagtcccactctgtcacccaggctggggtgcacttgcgcgatctcggctcactgcaacttccacctcctgggttcgagtgattctcctgcctcagtctcccaagtagctgggaatgcaggcacgtgccgccacacctcatgcctgtactttgtatcacacattgtgcattcagatttttactgaaagaacgaatatacctattgcagtatgatcaagcctgttttatgtaatgcccctgcatatgctcagaatcaaggattaccctttttatttttctcatttgtctcctatttcttttgcaaactaaataccctttcccccgcaccctctattgctggattttcttaggaactcttataccttatcttgctttggaaatagcaaaatacacaggattacagaattgttatcaattcacacatttgagatttatatgttaccaccattacttcctacaccagttttctagctacttttgtgtgtgtgtgtgtgtatttaaattgtgattgaattagaaaaccttgttaggaagttgaatttctgaagcaatcatttatgttcagcctgtgtaactaatggacaattatctttcagtttcctctggaatcttgctttaatgactttcagagtagtgtttatatatgccatcacttgcctaattagttttataaggaaatccgtgtcatcccgggtcatcctgccaatagaggcagcttccagttctcttgagcctcccgagggatgcattcccttcacaaagtgctggaagctggctttcctggagctccagggtcagggaccattttcctttttttatcatggaaatgaaaaagtcagtgtcagggaggtggctgactgtacgacagtcctgattattgacttatttctcttaccttaaaacttgagttatttcatcgtaaaattgcaggcaggaaaaatatatagaagcagtagccttcagattgaggatgaagaaatctctctgaacttcaaggaaatttggaaatgagcaaaaattttgaaaacatttgaaaatggaatttatagccctaataaaaaatgcagttaggtgtatcaacattttgattcctagaccaagcacagtgcctggcatataatagatggctaattaatttcattgaacgaatacctaagtagatgatggatgaatgccactggaacataatgtccatgagggcagtgttgctgatatttctagcatcatctggaaggtgctcagtaactacattctgagtgaatgactgagtgccagtaaaagataagctattgcgttatctttttttgctttttttttttttttgagatggagtttcactctgtcactcaagctggagtgcgcacgtggcactatctcagctcactgcaacttccacctcctgggttcaggcgattctcctgcctcaacctctcgagtagctgggactacaggcacgtgccaccacgcctggctaatttttttgtgtttttagtagagacagggtttcaccgtgttagctaggatggtctcgatctcctgacctagtgatctgcccaccttggcctcccaaagtgctaagattacaggcctgagccaccacgccctgctgagatatcttttttaaattaaaaaaaaaaaattagagacagagtcttgctatattgcccgggatggacttttgaactcttgggctcaagcttcttgcttcagcctcccaagtggttggttttacaggtttgcgccactgtgcctggctgttgggtggattttagtatgaaaactacagatcctaagagatgatccctgggcatatcaacaaagtatatgttttaaaaagccaagcttattagaaatattatgtcctatgatactggaaatccatttttatttgaaaatattaaatagagttgacatgttgaattttttagtatagattaaggcactagttcttaggatggcttttggtgcagtgactcacgcttgtaatcccagcactttgggaggccgaggcaagcagatcacttgaggtcaggagttcgagaccagccctggccaacatggttaaaccccatctctactaaaaatacaaaaaattagctgggcgtggtggctcacacctgtaatcccagctactccagaggctgaggcaggagaatcacttgaacgcgggaggcggaggttgcagggagccaagatcatgccactgcactccagcctgggtgacagagcaagactccatctaaaaaaaaaaaaaaaattattggggactctaaagagttttatttacatagattttatctactgatattggtcatattagaaatttaagatgagagattttaaagatttattaattgatttaaaatagtaatagtaatccctttatacagttacacaaactacataattttatgaaaaaggacattttccctaacaaaaaaaatttagtgggaagagtggtgttttacatccctcttctgtctgacttaaataaaacatagttggactctcagctgcttctgcttcaatctgttgtgatatgttttggttgaagtgtatgtctaacacatatatgtaattgaaaaaaggagggaatattttaatagctttttcacgtaactggagatattctttgatacttttgatagtggtcgttggcaagtaagtttctcaaaggttggttgcaaggtagagaatgaaaccgtgtctgtgtttcatattggtccatcttatgtgttgaatggctcttttatgtgttggtgtgaccgcattctttagtttggaaaacactatttcattgagttctgcaggttcttctaaatgttgacacatttcattattcaacatcaaaaaagtcacaattattagtatcaccatcagtctcatcaaagagcctttaagtattattaggaagccgtcaagctgacggtagatgcacattttctaagattgtgtttttcacttggaaaactttattgtatttcaaaaaagtatctgccaaatatccaagtctaagcaaccatattgtagttgttcttttgagtcaaagtggtgtttcatggagagagtggctgctcagctcaagacagccctcatccctggagtgtagccaaatgctttatgtgtcagaatatttactcagaattctgaacctttttttttttttttttttgagacaaagtcttgctctgtgcccaggctggagtgcagtggcccagtcttagctcactgcaacctccacctcctgggttcaagcgattctactgcctcagacttatgagtagctgggattacaggcacacgccaccacgcccggctaatttttatagttttagtagagatggggtttcaccatgtttgccaggctggtctccaactcctggcctcatgtgatccacctgccttggcctcgtaaagtgctgtgattataggtgtgagccaccatgcctggcccagaatcaataattgttaatgcttcatcgagactttcttaaatgaaactggcataaaagacaacaaaaagcccctgggatttcatggtgggaagaacataattcctgctagtaccgcctggcactgtcaccttgactcaggctaaggttcctgctgtcacaccaccattgctcttgcaccatcagtgcaaacgtcaacacaaggaaaaaggcaaatagtggctcagtattatcattaaagtggtttgatcatgaggacccttaagggtttgtggagcatactttgaggcacactttgatttaagaggttagaaacatcacattaaaattcatactaataaagtgaaattgtgccaattgcccaaaacagtgcatcaatccaaaactcttatttgtcttggagaaatgcattcaaaacatagtcaacaccactatctcattttgtctctgtgttgtgttaagatgggtttgcatactttcagcctcttagagcaggcagttggaacattatccagcagcaggttgaacagcagagggggagggcagctggaagttaggctaatctaacaaatgagtcatccacatgtggataatggagttgtaaaattactctcagctttagtcagcagcaaccaaactatacggttaaaaattacaggtctccaaaatagagacttcctgagaacttttagtatagcatttaactgagaatgtatcaagggtttggttgaggattttttcataaaacctttctgttctggaaggcaagtttgttattaagagcttcagtaatttctcttacgaagtgttcaaaatgcaccagaacctgaacacaatgtgagcagctgagtgttcatcttagctgcgtccatcaagtgaacggtttgctctcttcctgtccataatttgagagtcagcctaatggtgagtggacagtcatctaataaaatatttcatacctgtggcagcaggtataaagcaaatagtttatttttgctttccatgtaaagtttggcagtaaagtttttgtcttgagatttttgttttataagagaaattaaaattccttctgggcttttgctgttctcccctgaggatgaatatgctgcctgcctaccctgctaccccccgcatttggcaaggttgcacatgtcttagggatggaaaaccagtagccaacactaaaccaggcctgctgtgtagacctggcttggtgagtatggagctgttccgcagtagaggtttgcaaagaaaccatcacacccttgtttcctctctccttctggcttttcatttttcttctggccttttgcatggaagaaataagtcatcccttttgaacagtttgggtatggagtgtttgcccatgcggtagactctggcaggacagagagggttttcccgggcctttagttgtccaggtcctgtattctcacatctcctctgggctgctgactgcgcacaaacacaaaattcattcctccaatagaacagtgtttggcctggctcccaaaaactgctctcctcacttgcacggctttgattgagtgttaggtgtctctttggctgcctccagtgtctcttatttttagggccttcgttaatgtcttctgtgtgtgaaacatgaaaatggagccatggctgctggaattggaaacttagggtttttaggccaccattcccttatcacatggcgttatcaggttatttagttacagaggttaaaaaaaaagtccaccctaggagccggcgtgtgtggggaaaggagagagggggcagctgagcacctaatgggcagtgaaaaaagatattgtaactaaagctcgggctagtgtcctcagagcgatggcctttcaggtgctggcaggggtctgcttacagctcagcctggttacaaatgaggggataaattggtggtaacagtgcctttttatttttttcctttttcctttggaaactggcttttcacatgttggaaaacgagcttggatgctcggtgtaggtaacaggcaattctgatctgagaggaagggctcaggaaaggtgtgaccaaatgagccgtctgagtggtcagtcctgcccggggctcacccaggcagggagctggggtctttcatgtgggtgtccgtggacccacaggagacagggagggattgattacaggggagaccacttctgtttccctttcctaaaggaaacagaaaatggaaataaaaatctaaaattatgttattttccatttttggaattctgttcatttgtgtttggggccagttttattattttttttaatcttttttgagacaggatcttactctctcacccaggctgcagtgcagtggcaccgtcgtggctcactgcacccttgacctcccaggcttaagcgatcctcccacctcagcctcccaagtagctgggactataggtgcacacaaccacacctggctaatttttttttccccttggtagagatggggttttgctgtgttgcccaggctggccttgaactcctgggctcaagcaatctgcttgccttggcctcccaaactgctgggattacagacgtgaggcaccgtgactagcctgggaccagtttttgacggtccctagccttccatgagcattcgtgtgcaaatgcacagtccagaggcatgtttagttgactctggtttcctccctccctttcaatgtgtggaactcgcagcgttctttctctgcattgctgcgatctgccacacttctcgttttatcatggactgcagtacaatgtaattgtctgtgtgccagtttcctctgtcttactaaagtgtgaatgtttgatggaagaaactctgagtggacagggtctgtcataatcaccccagtattccccatcgtgtggtgctgagcttggtatgtagtggggagtgggtatgcagtgaatgtggaatgggtggatgcttgaatgagtacagccgaatttcctggccaggaaaaccatgaagtgttagcactgttctgattttacttcctccttcaggctatgggcgcgtgccaactgacagggcagggactgccatggctagtggctattacctaaactccagcccagttttggtgcccccgtttctgagtcctgagcaagtgttcctggcattgtgttggttcctatggtatgtgttttagtctgtgagactctttcctcagtttgaagatctgaaagtaaaatgtttcacccaaggtttttagattcgagagctcatcccgtaggccagggagagtgagtactaataccctatatgtggctgtgtttagaaagggctattgggaaacataaaaaatagattttgacattggaaacaaatacattttagtatgtgctgctaaagaaatgtgtgctataagctattctcctggggttataaatcattaaatattaactttttaaacgattaaacatgtgactatatcttattggttacaaataataaatgcctactcaaaccagcgtaaaccataaaagtagaatttgtataaggattcacagggtggtttatggggagaagggcaggaaatgctgccaggctacaagggagtctggaaccaggactagggcaataccaggagccaaggcactgctctttcaccccgagaaccctgggactcacccgtgcttctctcccagtatcagattcgttctctgtggcagtggttgggcttcctccacttccctgctcttagggtctaaactggcagtgtcacgtcgtgagcatacctctgccttcaagttcaaatgcagacagacacaagtctctgtttaaattcctgaggaagaatttggttggcccaatgtggtcagctgtctacccaagtccaatgaactctgctcatgggaatggggctggggaataaatgtggcttagagggctgacgtgagatcccagagtctggaagctatttcaaggttctggaaatagtctagtagggctacaaaactcagagcaagccatagggtccggacagtaccctatttcctttatttctaattattttctgctctgccttttgagggaactcatcagtgtcttcctgaggcctggaggcttttctgtgatcatgaaatgtactatctgaggcctggaggcttttctgtgaccatgaaatgaactatcaagagcagggcatgggctctgcagacagcccaggagttctctgctgcagggctaagtgataattctgctgaggcggttgacattcttctggttagctttagggcagatgaaagggaaagaatatcaggagaaaaaagagcatcttgaatttgtggtgttttttgaggttttttttttttttttttttttttgagatggagtctctctctgttgccaggctggagtgcagtggcgcaatctcagctcactgcaacctccgtctcctgggttcaagtgattctcctgcctcagcctcccgagtagctgggactacaggtgcgtgccaccacactcagctaatttttgtatttttggtagagacggggtttcaccatgttgaccaggctggtcttgaactcctgaccttgtgatccgcccgcctctaccttccaaagtgctgggattacaggaatgagccaccgtgcccggcctgagttgtattattttagggtttggggaggagggaagtggcgaagaatggtatatgaagggtgttcttgatttttcagagatgaaataattttatccagccatttatatttctatgtatttcttcggtatctgtttttaatatcctgttagacgttttagtctgtcaagagttattgctaattgtcaaccaactacctggttgcaatgaagataggttctttttatgccatgcactccagagatctactacacagctgggtggctatgatttgcattaaactaataaagtcccctggttaaaggggtatgtcctagatttaacatttgaaatcctttccattaagtgcagcacaagcagatctttctgcacattttggtgaagcttaaccatttttgatgactcattttgatcctaatctttaatttttctgattgcttttggtaaccttctatttgggctgtgtgccgaattttatgataggtatcctttagacggcagatataatcaggtgatttgattcagaaaaggagtttgctttcccttccgacttctgttttgaaagcaccaaggcactgggcatggtgactcatacctgtaatcccagcactttgggaggctgaggcgggtggatcacctgaggtgaagagttcaagaccagcctggccaacatggtgaaaccccgtctctactaagaatacaaaaattagccgggtgtggtggcctgctcctgtaatcccagctattcaggaggctgaggcgggagaattgcttgaacccgggaggcggaggttgcagtgagccaagatcgggccattgcactccagcctgggcgacagagcaagactctttctcaaagaaagcaccaaagaattcccccaatagaaacagtgtgtagaaaataatttggaaatgaaggaattaagatggtctgagatttttgtggcttgctctgtgttttatagccctggtgggctgcaaacaggtatcttgcttcagctctcagagcagcctcagtcactgggaactttttttttttcacggatgctgctttctcagcttctagaattgcctccttagtcctgagttagaatgtcagagacaggttttatgctactttgctggcaaggatcaccatcgcacacgtcatgtagtttatcttgaaattttatgatttgggaatcagattccttcaaataagtttgtgtcatctgttttgttgagagagctcgtggctaggatcgcagacgcgaacattgtttcttcctgaattgtgtccttgagttggttggtgtgtatctccagagtccattgtttcttttgcagaatgaaggaattggtctgcagtgatctcaaagataattccaacccagcacaccaggactcaaacttaagaaagaattatttttgttatgagtcatgtacatttagggttcttaccagacagaataattaaatacatgcagctctgctccatgcaggcaggctctgggtcctcacctctgcatacaggatgctgagcatggtagtggtttaatcaatactgttggtggtgtaaatggatgaatggtggccattctgaaacggctttgtaggatctaagctgtgttgggagccaatgtaagtctggtctctgtcatttggagtatattttgaaaatagaagattaaaacccctcttcatttaagttgccgtctaaggtcctggaccagccttggttcacccaggttttttcctctgcaggacattggctcacagaaaacagggctgcccccttttcctgcatatttggcctcggactgcctacttgactaatcagtttaagctcttccctcttaggccattaatcctatttctccagccgagaagcagcaggataatagtaatgtgtcctgtagctattaaaagatgatattgccttgcacataaataaagtacttttttttcctctgcaaaaggatgatcaaacaaatttaattttcatttatgcttttgcctttttgtgatatttctttgtatcttctagtacaatcaggggagaacatcatttttactgttattgatggttattttctacttgttttcagcatcctaacaaggtatttgctttcctatacatcgttacattttgtcatcctatgatgaactctcgttgctcgagggggcgaaaacagagtgaacgtggaaatgatctttggcatgtggtattttctgaaaaactgaatttcacaataagcacatttcgtggcatttgctaacaataatctccacattcctagaggtcagattttctcattgaacacatttttttttcttttcagtttatatatgcagaaagggcttcattaaaactgagatcattctcattcaatcttaagctggcagccaacccagatccttttaatccctgctgtatgtgctaatgaaaactcagggaagtgctgatgaaagggaggtggtgaggctccttcctctccttgcctggagacttaacctgtacatttctaggcttttcagagttaagttttgcacctgcttgtgcagtggtgatggagctcctgaggtatttctgcatttgcttcctgggtcttgaatttccaccattaaatttcagtctagtggcgggtgcatgggtgtgtgttacatcattctgagtttttttgtacatccaaaataattttgtcatcaccatgatcgtggctgccatcatcatttcgacttttgagagtcagtttatcctctcacccagcaaatctgcttttgagaattggccctaagcaagtaatcttgaatatggaggaagatttttgcacaatgaacctgcccattgctggtttattcataacagcaaaaacattggaaacatccttttccagttttgggggaaatgattcagtgatgattggtactgtatattcaagtaatagaatattaagtatcctttcaaatcattgcttaggataaatatggaaaaatgctcttgaaaatataccttcccaattataggaaagatagtaaattatattcacagtatgattaaagtgatgttttttttgagatggagttttgctcttgtcgcccgggctggagtgcaatggcatgatctccgctcactgcaacctccgcctcctgggttcaagtgattctcctgcctcagcctcccgagtagctgggatttcaggcacgtgccaccaagtccagctaatttttgtatttttagtagaggtggggttttgccatgttggccaagctggtctcaaactcctgatctcaggtgacccacccacctcagcctcccaaagtgctgggattataggcattagccaccacgcccatcggtgattttttttaaatctagtttttaaaatacctgaacagtgatggtgtaaaggacaagatgatagaagacttttttcttttcattttcttgattttctttatcatccacttttttaaaagacaccaacattatttgcataacaaaacaccatataggccggcacggtggctcacgcctgtaatcccagcactttgggaggccaaggcaggcagatcacaaggtcaggagatcgaggccatcctagctaacatggtgaaaccccatctctactaaaaatacaaaaaattagccgggcgtggtgtcgggtgcctgtagtcccagctactcgggaggctgacgcttgaacccaggaggcggaggttgcagtgagctgagatcgtgccactgcactccaacctgggtgacagagtgagactccgtctcaaaaaaacaaaaacaaaaacaaaacaaacaaaacaccatacagatggatatctaaaagtgaatgagacttgaaaatcagccagaaatgtttgctgtggtgataaacataacccttaaaatgattttttaaatatttttttaaaaaatagggtcttactccaatttcccagcctggagtgctactggagtggtgtgatttcagctcactgcagcctccacctcttgggctcaggtgattctcccaccttagcctcctgagtcgctgagactacagccacaccaccatgccctgctatttattgattttttacttttgggagagacggagttttgccatgttgcccatgctggtcttgaactcctgggctcaagtgatccacttgcctcagcctcccaaagtgctggggattataggcgtgagccaccacgcccagccaaaatgaattctttggggtccagaaatcttgtcttttgcaaagatagtttgatggggcagggttgctgggaaatgagggtcccaggctaacagttctctcaaatgtgcttcatggctcctgagtgccagctctgagtcatgggtataggaactggtggaaggagacagagagagagggtgctgaagctgggtggtgggggagggcactagaggcagctgtggtctaagtcacacttgggtcttgcatctggctttctgcttttattactattatactttttaatggcaatgagctgtagatacaaagccagctttgagttgttaagaataatgaggtctgtcctgacagtacaggcagcagaggcataagcaaataaatcccaatgtattataatatgcaattttatatttagacttcgaatgcattatgatcattataaaaaatgtctatttctaattctgttaaggaagatggtatagcagtaggggctttggaattacaacagggttgaatactggcgctacttgttagctgtggtttttggataagtaatttaacttttcctggcagagttttctcgtttataaaatagaaataatactacctttctcataggagtttgtgcttattaaatgagaggtaatgtatgtgtgattcatggtgtatgtttggtagatgatgattatcatgaataactagtaaagtaagtaatgtgatttaagttatgttattagaagtcccactgaatgccgtgtcaataggaacacagactcatactagtttggaagggaaatctggctcggattctaaacggtaccttggaagtgcagatggacaacagaatgattggagatgagtgccttggtaagccagttctttctggtgaacttggaagcagagaaaagagtaacaaaaattatggaatttaattatattaattagaattatatgatgattataatagaattgccttttgttctggagttaacattttataactttataattagatctcttgaacatttgaaaagttcaataagtacttgtttgtgtcatattagtctattctaattgatacacatgcacatagagcacaattttttttttttaagcccaaaaagtttattagcgttgggatgggatttgacgcactgaggttttccctggacaagattcttaccttctttgagggctgagtttaaatagttattcccaggagggcagaggaactcttccgttgtaattgaataataagtgtcattcttgggtaccagataaacttaactgatcacttaattgatgctttgaatggctgcataatgtgtaagtccttagaagccagagatgagatttgttcatattttgcccttctagtacctagaaggtactttgcacatggtaatgaatacatgtgtgaattaatagatggtaatctattacactctacccatttcctttctcaaagattcaagcctaaggctaacatgatattgagaagaagaaacgtaactaccttgctgttgacagtgtagcagcaaatgtaataatgtgtggaacttcagggtttcttgttcattcggtggtcagcatacaaaacatgcgtcagtaccttttttcttgtcctcttaaaattttatttctttacccccagagtgatgttggcacatttgctctgctgaaatgatttcaagagctcttcattgctgattcatttaatgattactgtccaaatggccccactcccacaaggaaaagtgtctccacattaacaagcactttcttctgcttgatttctatggttacatacgttgtgtcactttgaggagttggaaataaatttaacaggatattaggatgagagtacctttaaaaaaaagttctgctaaggaagtgtttcatcctggtgaataatgaaatcaggttaaaatttgtcttaaattaataatgactttcgacgtagtccttgttctcacatttcatgggctgattgcttttttattttagctgaggtcatgttaaaaccaaaataaagttatttgaaaatctagtgcaaaattttatttttctatcaatttgtgattcccagagcaaatttggggagagccaagtaaattaaaaagtgaatttaggtgatgttaagtctaagatagccctcaataaagatcttctcagaaaattcttgagtggcaccaacttttgtcactaatagcccacagacacgcgtcactttaattctttgaaaacctacactcaacagaaatgataaacttataaatgattttgcaatctgctgccggtttcttaaaaaaaattatcagtttcttagtttattctgaactggatttgatacacagaaaactggttttcctgcctgcttaggaatatatcacatcatgtaataagcctctcagagatgtagcattgagcagattaaggcctcatttatagaagaattccaccctggccatgtgggcctgaaactctggagggctttaacaatgtcttgaggtcattgtcatttaaagagatgactcagtggttttatttagtagaaataaatactaaataaataatctccacagattatccagaggggtaagttgaaggatgttgacagataactcagtaaattgcgtctcaaatattaataagtttattctatgccagcaccaaaaatatttcagagatgcttttaggcttctctcaagtatgtcgggaacagaaaaggattatagaaatatttatagtaggcataaacttgcacaaaagctcaaagtaccttaagcaagcttgttgcaattattcttttggagaactggattaagtaattatttcttgttgcctctgactatttaacctcctactaaactgcccattgtttaaatgtctcttatttagctctgtttttatcactccttaaatttaatattctcaaggccaaaattatagcagtgatggtcaggacatctttgaagacaattagattctgagaggataatttatatgtagaattaggaatattcatatcactcagaagtatcataaaaaccattctttcacaataacttttccactcaaacatcgccgaacttgattaccaagaccctaactgtatttcacttctttgcagtatttgaagttggagggaagggcttccacagctgaagagtttggctaaaccatgggaccctttcacattggctgagggggtgacagtgggtattgatccaagccagcccgcccttacttggttggaactctgttttagtacttgggggtgacaggggaaaggcctggagagcatcagtcctccatgagtcttagctgctccacgagaaaaatactcactgttttctcataggcattgccacagtattctctgacgagtgtttagcaggcatggcctggtctgggaaagtcctctattccttggccctgcctggaagttgtggtgcggggaggccatggattggaagaaaccctaaggtggatatccgaagggctcttaaatgttgcttgtggcagctgggaacagggatactaatgaggaaggacaagctcttcgatttcaggtggttcaggagcctcaggcaggagtcagatttaagggataagtggttcctattttcagtatctctcctccacaggtctttatggaaaatcttaaaacccactcttgtcatccgaactggataatgcaggttcttggcccttccagtgctacattgaaccaagggttcagaaacaattgagcggtgggtggtcagttccaaagtggcgcttagaggaagtctcgaagtgaagagggaggtttagggaatgagtttggagtcgtgttttcatttcttttggttgaaggaatttaagagtatcgtctttatctggttttatgtattgcttttctttttgtttggggtaggtgattaaaaatagaaaagtggggaaagagacaaatttagccttcaacaagctctcggtgatctgtgaccatattgttttcactgaagattatttacaacatgatgcggccttggttgctgctgagctggcttcagggcagtagataggaaggatgtttccaaggaaaactactctgaatgaacttgtccttgggtatgtgagtaactgatatcaaccaaaccaaatgtcaataagtcattcattgtgaatcatcctttttcggtcttgacactgcacgtaccagatcagttgatctctctcctttgtaagtctttcaaaagacgcatacattagattttttttttttttaggacagggtctcgctctgttgcccaggctggagtgcagtggtgtgaccctggctcactgttacctccgcttcctgggttcaagcaattctcctgcctcagtctctcgagtagctgggattacaggcacccgccaccacgcctggctaatttttgtattttagtagagatgaggtttcaccatattggccaggctgatcttgaactcctgacctcaagtgatccatccgcctcggcctcccaaaatgctaggattataggtgtgagccactgcgccagcccatacattggattttattttcctccaacagcgtggactctacccagtcttcctggttctggttttccaatagttttcttttcttgaaggtggtcactgtttcttaaatgtttatagatttactttagctttccattaagaaatcaagtaaatcagatgtacttgtcctaatgtagtaatatagataataaaattgttagtggttaatatttcctgaacatgttctctgcgtcaggcaccaatctaagtgggacttggctcagtttccacaaagccccatggaatctggtttacagagaacaatgtgagagtgtctgtttccccacagccttgctatagaggccatggtatcatctagtgacaattttcatcacctgctctattaagccacttgcgtgttctagaaggggttgagctctttctttctttctttctttcttttttgatacggagtttcgctcttgttgcccaggccagagtgcagtggcaccatcttgtctcactgcaacctctgcctcccgggttcaagcgattctcctgcctcagtctcctgagtagctggaattacaggcatgcgccaccacactggagtaactttttgtatttttagtagagactgggtttcatcatgttggccagactggtcttgaactccagacctcaggtgatccacccaccttggcctctcaaagtgcaggggattacaggcatgagccaccaccatgcccagctgggttgagctctttctcacctgtaccttttagtgccacttcctctgagcagactctcccactctttagccttcctgatgcctcttggctctccaggctgggtgtcatctgtcctctgctcaattgtcccacgatttccaatgttcaatgttataattgcctggtggttgttggatgccttcactggatcctgagctccttaaggttgagataagtctcacttttgtgtctcatgggcctgggacacaggagataacaggtgaagtctgttgatcttacctgatggggaaatgtattttttctgtctccctcaactagtgaggtgccttgcaggtttttttttttttttcctctttgttttttaattttttgagacagagtctcagtctatatagcccaggctggagtgcagtcgtgcgatcttggctcactgcgacctctgcctcccaggttcaagcaattcttatgcctcagtcagccgagtagttgggattacaggcatgtgccgccatgccaggctaatttttgtattttagtagagatgggattttgccatgttgtccaggctggtctcaaactcctggcctcaggggatccacccgcctcagcctcccgaagtgttgagattacaggtgtgagccactgtgcctggctgccttgcgggcttttaggcacctcaatgtctagttttgtcagaatagcatcctagaggtcttagaaatcttacctgttggagaaagttttaaagtgccccaaacatcccagcagttgtacatcctttcactcacactaaaattcatcctgttttgctttcacaggtatgtacattttgatgaaaagacactgcaaagatgagcaccagctagccaaattgtgtagtaaacattgcatgtctatctgtgtgtgttttattgttttgttattttatttagtcaacccttttgttattttaccataagttcatttacacagggtaatcttctcccattacagttgcatggaaggaatcttagaggaaacagttactgattttcttagtgtgagaccagaaaaatgaagcgttggtattggccttggggatttgctgtcctttatcctcggtaaagcaaaccagccatccgaatgtaaaggcagctcctttctttccataagtaataagtcatgatttcttaatgaggcaaattatctatcatttagtgaattcatagtatttgttacaagtaaattcattaagaaagagcgctattccaataaagccaatttaattacgcagacaattaaggggcatcttccatgtgctctgcactgtgctagccacggggtggatatagaaatggacaaactagggatgggcttatttatttatttatttgtttgttttgagacggagtctcaccctgtcacccaggctggagtgcagtggcacgatcttggctcactgcaacctctgcctcccgggttcaaacgattcttctgcctcagcctcccgagtacctgggactacaggcgcgtgccaccatgcctggctaatttttgtatttttagtagagatggggtttcagcatattggccaggctggtctgaaactcctgaccttgtgatctgcctgccttggcctcccaaattgctgggattacaggcatgagtcaccgtgcctggcctggaatgggctttttaaaggagattatagccaagggcagtggtgtgcacctgtagtcccagctactcaggaggctgaggcaggaggatcacttgagctcaggagcactgagctgtagtgcactgtgccagttgagtgcactaagtttggcatcaatatggtgacctcccaggagtcggggaccaccaggttgcctgagggaggtgtgaacctacccaggtcagaactggagcagatcaagactcccatgctgatcagtagtgggatctcacctgtgaatagccactgcactccagcctgaccaacatagaccccatctcaatcaatcagtaaattcatttattcattcataggaatcacagacaagggagtcacttaccataaaaaatatacaaaataaatgactccagaggcataaaaccaaaggggttttgtgccaaaaaataggaatcaaggaagtaacatttgaatttgatcttagggaatggatgtaccttaaacaagtagccctgtatggagaagaggagagagggaacgataatgaagaacagagacgtggaggccggaagatgccagctctaccagaaaaagtagcaaaagtcaatgtgattgaagtagggggagtgcgggagcagggagggtgtgattgatgcctggcagctgcccgtaacgtatgatgcagtatggttttcgcctgatttggggtttccagttctccctggctgctgacggggctccctcaggcacacattaatggattcactcagccagtgatttttctgttttctctttcatttccacttttctatcccatcatggttttctgcataaccccatctgattttagaccaattttgatgtgatttttttcttctacgtgagtggctcagtgaaggctttcgaatactattttcccacttgcatactgtttcagaactgaagaaggtaaaatctaattgtaccaggtttttgaaaagcagtagtttccattgtatgtgtttaaaaagtccccaaaggtctatctgtaagaatctttgaaaagacacattgcagcccaaaccttaggagaaaagaaaaaggggacttcacattgtaaaagcagcatttatctttgcatcttgaagttcctagaataggctctcgcctttataagtggagttttcttgtggcttttgtggggagaattcactagaattagggcagattttctggaaagtcccgaaattcagtgttctgttggatttctggcatctattgagcaagacagttgggataatgagtcttggtattaaatgtattctacgggagggaggagagagaagtgggaggaaggtgtatccgtcttgctggcttcctgcagcttaagtaggaggaagaaaaggagagggtgtgagtagatgacccaagccctggactaagccctttaggtacatgatctcatttaatccccttttcagaggaaactgcctgagatatgtttgacccaggctttgtgctcttagccactaaatggcttccctttactgatgattttactctgcctttatcctatagttacttataggcagctatatttacttcctccaaatagattaactctttgtatactctttggtacctggaataagtcctgtgtaatcctaaacgctcaataaatatttcttaaaatgaagataattctccttgacagaaaattgatcttactgagcatatatccactgagaaaacagacgtatgaatgtttaatactccctgattatcgtatgctttcttatttaagcagaagtattaaacgcatgccaaaggctcacataaatgatttattatgcaccaattaacgttatctgagccatggtttttctttgttgttatgaattgagcattgacagcaaggcagcactcatttaccttttgtttctatgcagaaaacatttcaaataggcaactgttgtctctcctgagtagtctgagaaatgtgaatggagacatttgtattaggtgtccatctcgtgaccaatatgctttgtacttttgaagtttgctttatccttaagattgtgagaactgtaaatctgccactggaaccatccctgcagattgtcataatgtgatcagctctaaaaagcttcctgctttttagagtgtgtacccttaaggataacaatcatatagataaccttttagatgtcaacacaggcgatctttttatgtgttttattcatgatgcaatttacagtacttaaaggaaaaaaaatccagaagccttacaaggtctttaataagtacaaatatagattgctataggtagaaagtatgctttaaagcaaacttttttacaccattttctgaggcttttattaattactctgttttccagcgaggctttttcatagggatatgcacctgactaacttattaaaagtaaattgcctttgtggtcttattttcagggcgtggtgctgaagttagaaggcgattgggcagttttgttttctacagagaaaacacaatctgggaagagatcttaattgacctattagctgaattgaggagatgaattagttgtagaaaatttgtcaaagttaaataatagcagtgagtttgaaggggtgagctagcagaactagaagagaaaggagaatgagaagtaactcacaggccagctgcataatgggtagagcgagctataggtgaactgtgagtagctggcttgctctgttggctgaattccttgaaaagaaaggatgagacatttttactccagtaaatcttatgtgtatctcttgtggattgaagaaattattgactcaatatgatttaagttagagacaaagcacactcacaaaattccaaaatcagtcttttaaaaaaagcacttcatagtgagcaaattttaaattaaatcatcatctaaattgtgacatgcattgagaggaacaggtgaggtttttactccacgttggtctccatgtaacaataattttcatgtcaaaatgatcttttcaggttttcaggttgccctcttcccctctcctttctgttttcagataattggatgaaagtaaaatcttttgaaaacattgctttcagcgtgccaaaagcaaggcatttataactggcctcaatttgcaaacaatttaggagtttgataagtttctaacaggaccatggtgagttcacaaaatctgatttctttaatggaaacaaaaagtgtgctttgtggaagttgatgttaggaattacaaagaaacccactgttcagcacaagtgcgcaggcctttggccaagaattcctcagcttggaacctgagctaagaaaaagcccctggtcacacctgtggataaaagacttagtgagagctgggaggacaggtgaaaaatgatggtttggaagccagagactgttaaatagaagtgacagaggtgagagaggtatccaggaaaagccactgctgtacctaaaacagtagttaaaaggaattaaaaatgtaaagtcttagacgtttggaactctgctatttctgtacctttctaaatgatcttctcagcccttcagagtctgttacactgttgcattctaaaagatggtcttgatagtaaatggggtaaaatggtctcatcaggtctatttttctctcctggttaaatgtctacttaggttaaataaaagctgtcctgttgtagtcaaaacaattagttcctggcctcataagaccaggtttgaatctgagctgtgtttttgctggctttatggtattgggcaagttggcaatgttcaacttaattatgtcttctcatttgctaaatggataccaatttatgagactatgctcacaaacctaaagtgaacaggtgaaagaccctctgcaaaatagctgctcaataaactgttgcatgctaatcctaaataagcacttaagaggtatcagttacaatgaattccctgtgtttataaaataacttacaggtgcagttcctcttcatagggagtaacatgaatgagtaacatcacatcaccatactgttctgagaggtacttggcagattggtcaatactgtgaactcagaactccaaccgtgggatcccagccatccattcagtggcatttctaccagaacatctgtgtaagagattgaaggttaattttggcaattcttaccttgtacagaattctgtgcattttaagttaaattactgtaggtgattggggattttgaaaatctaggctcaattgttgacaattccagtgacctttggtctggagcaaatcccttagcctatatatatacacacatatatgtgtgtgtgtgtgtgtttatctatatgtgtgtgtatatatgtgtgtgtgtgtgtgtgtgtatatgtatatatatatatatatatatatttttttttttttttttttttttttggagacagggtctctgtcacccaggctggagtgcagtggtgcgatctcgactcaaggcaacctccatctcccaggctcaagtgatcctcccacctcagcctcctgagtagctgggactacaggcatacaccaccacatccggctaatttttgtatttttttgtagagacgggattgcgctatgttgtccaggctggtctcgaactcctgagctcaagtaatctgcccaccccagcctcccaaagtgctgagattacaggcataagccaccatgcctggtctcttagcctgcatatttcatgtttctcgttcataatataaagacagaaaaggtgcttcctatgggaagatagatgtggacacaatttcacaaattaagttttatacaaatgtaaagtactgcaattcatgttgacctctcagcttagttggttttagagtaaaggggttagctagaggcctgagtcttgctccctggcctggcccaaattacctgacccaggagacatctcaacctctctagcttttagtttcgtaatctgtagatcgtgaggggggttgactccatgattccgtgagctttcttctcaagcatctcattctagaatattccatcggtccttttctgtcaccttcttcccaagtggttgtgaaagggtggcttgtaggcattaggccagagctgtgtgttagccataattcagataatacagcttataattcagcttgtgttgatcagaaactctgcctaagggaaggcccaggtaaaacctgtaaagtcctggagtttcatcacagatgatgctattgcagagcctccaagattttgcctcttttttatgagctttggtgactaccccagcctaatgaggtccaagatatcccagtacttccacgggaggatcatgtgaagattgctgtctggttccaaaattccctcctaaaacagcaagggtggcacctggggaggaggagggacctgggggaggaggagggacctgtgagaggggtatcagtgattctgcaggtgattcctcctcttcctgtcctcttattaaaattccctgaggctgacttcagctagatgttgatcagattaaagcagttggtgctgggatggattaataagcttgaaattttttaacttggatgccttgaggtacttatttcatccccaagcattttccatctctatcccaactagtccagtaaaacctgtggcattgctgagcaataagcaatgcacctgcccgttttcactattggatctggctctgtccactcttttctgggagaacagaggggatgggtggcgtgatggcccactgagtgctgggcttctccatcctccatctgagttggctgcattcctgtcccaggtgtcctctgcctctgttgagcccctgccactgctacctccaagtgtccttccttccctccacatgcagaatggagctttccatccccaaagaactcgagcagcctgtttgcatcactgccaggagacctgtttggtactgccaagcactgcaggtatttctagctcagttgtcttatcattagggtgaacatatttatcctctaaaccaggacacttttgaaagtgaagggaggagagccattaataattaagctgggacaacagtcataaaccaggattgtctgggcagactcaaacatgtggtcgccctacttgttccctgtacttgatggaagccttcctgacggtaaggacagtccttccacatcccctcaacctccacagtggcacagacataattatattgaatgaagcgataaataaagctattttgatactttttttttttttttttttttgagatggagtcttgctctgtcgcccaggctggagtgcagtggcatgatctcggcttactgcaacctctgcctcccgggttcaagcaattttcctgcctcagcctctggagtagctgggactacgggtgcacaccaccatagctggctattttgataagctttaatgacagggatggcgaacagtggttaacagttagtgaggcattgccaggtgcagtatgtgaggtcagcactttgtataattatttaatcttcacaatagcgctatagatttgatactattttttttcttttcttttcttttttttttttttttttttgagacagggtctcactctgtcgcccaagatgcgtgtagtggtgtgatcataggtcactgcaacctggaactcccaggctcaagcaatccttccacctcagactcccaagtagctgggactacaggtgcatgccaccatgcccggctaacattttatgttttgtagagacggggtctcattatgttgcccaggctggtcttgaactcctggactcaagcgatccaccactgcccatcctatttttctgtttttcagagaagaatattgatgcctagagaagttaagttgcttgagagcagagagtaagcagcaaagctagggttcaaacccagagtgtaatctcataggtgctgtattatacagataagctagatgcaggggcaggctggtttgtaagagggcatgttgcctgtagcatttctccttagtgaatctccgaaacaaatcacatcctgtttatttccaacaaaagagaacaaatttgggattatatctgattatagcatgcgagtagcaaataagatatgatgtatgtatttttgcagttttttctttccaagttcccccatctttggccaaaatatcacattttaaaccaatgaagagttaaatctagagttaatcacttagcatcagcagtgcagccagaattctcatctcctgattctaaaactgcctgaccctaccctggagtcactgatcaggttgagaggagttcagaatgaagagagaattgtttcaaccacctgttctgcatgagagcctttcaccattttctgtgtgtttgtgaaatgaccattctgaagttcagatccacatataagactcattcaaaatgatcttcctcaatggaaaccgggggtgagatttgaacctgagagagacagtctgctctggttgatgaacagcatagctctggacccagactgcctgggtttacatctcagctctgccacttctaactttgtgattcaggcaaattatttaactcccagtttttttatctgtaacatggggataataacagcataagagcactagccacactggatggctataagattgaaatcaattactatgtgtaaaaatcttagaatagggcctggcataaagcgacactgtgactgttttatctgtaatatatatgttgctttttaaaggccactaggtgatacattagagcaggcagggtgccatcgaatgacccaaccctttgtcatctggcaatattgcctaaaatccagacggtggattttcaccttcaaagtggttctttgggcacaaggcaagtcttccgaaactccctacttgatgcctggcgtattataggcgtctcatattttttgttaaattgaactgaaaaattgaagcgctttgtatctaaacaaatgtagaaaagtgagacgctgtatccagggtctgaagttgaaaagatttaaaatgtggatggaaacttcagggatgggggttgcatgggatgtttgtaattacttatggatgatatgaagatagtacctgctgtattttaccatgtatatgagtctcgtggggacttcatttaaaaatgtgtcttctgcatctgagatcctgactcaggaggtctagatgggacccaggaatctgcactgacacaggcggtctgtgaaccagacttggagaaacactattttagtccagcgtcttggatgcatgagcttatagttccttgacaatggcaaaattagaagtctaactgaaatcacctacaagatgtgcatgtattacatataccattggagacacccactcggagttttcttattgagagaacatttcagttttgatttcataggtaattgggcggtactgatgaatcactaggttttttttaaatgtaagcagtgatacatccacaaacactttcctgagaggtgatagtctcacgcaaaatttaagaaacttttattcttggcttaatctttgtgactgtattttgtgttatgtgtattctttattttgagacatcctgaaatccttaaattttgctcattttcttaaaagccaaatcccacataactatgtaagtatattctttttcagcagttttctctggggagtttcctaaataaatgaattgaatgggggagccatgatgaatgggtcagtatgctcattgcagtgccatctcttaaagggataaactggcagcaatctaaaagggcaacaggccaggcgcagtggctcgcacctgtaatcccagtactttgggaagccgaggcaggcagatcacttgaggtcaggaattcgagaccagcctgcccaacacggtgaaaaccctgcctctactaaaatacaaaaattagccgggcttggtggcgggcacctataatcccagctacttgggaggctgagttccagcagaattgctggaacctgggaggtggaggttgcagtgagtcaagattgcgccactgcactccagcctgggtgacagagtgagactccttctcaaaaaagaggggaacaaagggagagagattgatttatggctcacatgcataataaatatacctaacaattaactatgaaaatgtagtgtatttgctgtcatgaaaagatgtttgataatcatcttttatgtaagtgaacaagcatgttaaagaacacattgtaaaaaaatatcataatacagccagtatttactgagtacttgctatgtggtggacacttggaacgcattatctcatttaatcctcccgtaaacctgtgtgtttaaagtactattatctgtattttctgatgagagacttgtggcccagagagggtaagtgacttgtccaaggtcgtacagcctgtaaatgttccccaaaagcccatgtactttcttcactgtcatgcattactgcacctggggcagtagctacacactttgtttaaagggcctgtatgaataccccaaaatattcatgatatcgattcaagttgtaggagtttggtgatttgattaatttttctttctgcttccctgcattttcttttttcttccaacagccagttattaagtcaaccaacaaataattctaatggcttcctaaatgtagaaagttggttaattttggtattgcttttgccattcagggatttacatagggacaatcacagagatgctaaaccagttaacctttgtaggaaagcggccattaaaaccctccctcctgttttcacgatcactttcatcctaaaatcgggtagattacctctgcgtttgtaacatcttcagtattcaaggcttggatgtaggagagaagccagtttaaatggtcctcacttgtttagcacctacttatcaccccgggagcccttagagttaataaggagcccagtgcaccggtgatcagctactttatttccagaagtgggatgtgggggccctgctgctgcagtgggggtttgagggcagctgttcacctgggtgcatgtcctggatctcatgttgggggcggcagtgctcccctggaaggggatgagccagggaggagtccgcaagggaggatgggccagggagggagggctctgaagcacacccttgctccctgggcagggtctgcatccagggctccttccttccgcctggagctttcccatgaatccttcctccaccacctcctcaactagcacctccagctcgccccgcctgacccagctccctcagcccatgtgtccccgctttgccagctcttctgtgtgctaagtggcacggactgctgtctgtggcttcagtccccggtgggggagcgctggggtgttccgcctcctaagagactgttggttgagggcccgcatatctgtttctgggtttggtgctatcaaggtcacacgggtgtcgccccagactcctctgctgcttacagggcctcatgctggcgtcaccatggcatcagcccagcctagtggagacttgctatctgatttccatcatcctccattcccctttgcaccgcagccccctgaattaattaagcaagcaagcaaacaatcaagtcttgttcgacactgttaaagggagcaggcttcctggtctgtggggagctgcaggggagggatgtgatgacttaattacaactgccacttgactgagtgtctgctaagtgcagggtgctgagttgcattcttttttttttttttttttttctttctgagacacggtcttgctctgtcgtccaggctggagcacagtggcttgatcttggctcactgcaacctctgcttcctgggttcaagcagttctcatgtgtcagtctcccgagtagctgggactacaggcacttgccaccatgcctggccaattttttatttgtatttttagtagagatgggatttcaccatgctgcccagggtggtctcaaactcctggcctcaagaaatctgcccgccttggcctctcgaagtgctgggattacaggcatgagacaccgcacccggccttagttgcattctttattctgttgaatctttatcctttctgcatggtatgcagccttgaggggggtaatagcttaatgggagaatttatagttttacctgtatattcggtggaagatttcaggtgagcagaagttctgggaggattaagcgtcgagggagatcttgagaatgaacacagttgaaaatgaaatcagtccagttgtaagtaataagtgatcgaggaaaaggaagttccttcacctggttaatgaatatttattgcctgtcacccggaaaaaccctggtctcagaagacttaagggtaccgggtttgtacaacaggcagcttttgcattggacttgctggctgaagccagatacctacatgggctgtatagtgatggatgcttcattcttccttggtctgcttggttggaagtggagtcgatggtgcttctagctgatccccttacctctgaattttgtcccggtagctggtgactccttggtgaagtcagtttaagtctctgggaaaagcatcccatgcatatcatattccaaatgttctgtgtaagccccaggtttctttcacaggccttgtgttattagagttctgggggcagttcttgagggcatgtgtcttttctgccaatatttaaaatagttgttggctttaggcttgttttacacttcaggtcatctacaaaggaaatgttaatttgggggaaaagagatgcaatgaagagataaatatataaagatacagaggctcataaacactctggttcacagctcctggccagccctgtccataggagccatatggacccggcatgtggcttaatcctcgtaagcctgggtccctcagacaactgtgaagggggatattgctacctgcttgctaacatgctgagctgtgaagataactgaggtcatggataatgaagtgctgggcacttgcaaaacatgatttacaatctcagcaaagacttcattgtttattcagtatatatttattgacttccttctgtgtgctgggtacagagccacataccagctctccttggagtgtagtccctgggcaggaagcttcagcctgatggaaacactgtttcctaggtttcctgggccctgctgaagccggctgcatcagaatcttcaggaatcagtgtttaaccaccctcccctgactgatacctagtcatgtttgagaaggccccctggcacagtaggagaggttcagagacaagctaactgctatgggcgaggctggcacaggcagtggaaggtggtagtaaaagaacaggtggtctggcctggcgcggtggctcacgcctgtaatcccagcactttgggagaccaaggcgggtggatcacctgaggtcaggagttcaagaccgggctggccaacatggtaaaaccccatctcttctaaaactacaaaaattatctgggcatggtggtgggcgcctgtaagtccagctacttgggaggctgaggcaggagaatcgcttgaacctgggaggcagagactgcacagaggctgcagtgagccgagatcatgccactgcacttcagcctgggtgacagagcgagactctgtctcaaaaaaaaaaaaattgaataggtcgtctgctgggtgaggacccctccaccccagctctcatcccctggcccgagggttggagcactagacttcatgtaccagttcaggatatgcatatctggggagccgtcctgggcatcggcatctgggagagggggtgaggatgggtgggggtccccatgtaagtcctttcttcaggttgtggcttctgcatagctccttgttgtgtggacctgtgagtacacaccctggaaaggcaagtcaaggcctcctctctgctggtttcaagtggtggagaagccctgcatgactgaggcagagaagatgctggaaactgtggcaccaaaccacctcagagcttgagttcagtcccctgcaaaatcccaaagcctccggatttatttatttatttatttatttatttgagatggagtttcactcttgtcgcccaggctggaatgcaatggcatgatctcagctcactgcaacctctgccttccaggttcaagcgattttcctgcctcagcctcccaagtagctggaattacaggtgtgtgccaccacgcccagctaattttgtatttttagtagagatggggttttgccatgttggccaggctgggctcgaactcttgacctcaggtgatcctcctgcctcagccttccaaagtgctgggattacaggcatgagtcgctgtgtcaggccccaaagcctcaggattttagagcgttgtcaatccccttactctcttggccacctcagaaaaccaagaaacaggaatttacttgtcccaggtctatctggggctgagctaatgcagagcctaggtacacagctgcttttatatatatagatatacgtgtatatatatacatgtatacatgtatatacgtatatatgtatatatataatgcctatattatgtatatataatgcctatattacatatataatatctatattacatatatgtctatattttatatatataatgtctatattatatatatgtctatattatatatataatgtctatattatatatataaaatgtctattatatatatataaagtctatgttttatatatatatatatatatatttttttttttttttttttttgaggcaggacctcactctgtctcccaggctgcaggttgctaattaatttttttcttttaatagagacagattctcactacattgcccaggctggtcttgaactcctggcctcaagtgatcctcccccttcaacctcccaaagtactgggattaggcatgagcccctatccctggcctgctgcttattattgtcattactgttcatcatggtttactgtgaatggataaaagggaaagttaagaaccattgatgggcacattatattgtaccccacatgttaatataaaggttcttctaggctgggtgtggtggcttacgcctgtaatcccagcactttgggaggcccaagtgggtggatcacctgaggtgaggagttcgagaccagcctgggcaacatggcaaaaccctgtctctactaaaaatacaaaaattagctggctgtggtggcgtgtgcctgtagtctcagctactcaggaggctgaggcaggagaatcgcttgaacctggaaggcagtgagctgagattgggccactacactccagcctgggcgacagagcgagactctgtatcaaaaaaatgttcttctgatttttttccctctatcacatatgccatttaaaatataagggatatatggaggtatgattcatgtatcataaaattcaccattttggtggttttttagtattcacggaattgaatgactattaataccatctactttggaacatttttgtcactccagaaagaaaccccagaccccttagcaatcactgtctattctccctctctgtagcccctggcaaccatgaatctactttctgtctctttgaatttgcctagtttgtacacttcatataaatgtaattgagcaggctgggcgtaaagtctcacgcctgtaatcctagcactttgggagaccaaggcgggcaaatcattgaggccaggagttcaagactgtcctgtccaacatggtgtgaaacccggtctctactaaaaatacaaaaattagcctggcgtggtggcacatggctgtaatcccagctacttgggagggtgaggcaggagaaatgcttgaactcaggaggcagaggttgcagtgagccaagatcacaccactacactccaacctaagcgacagagcgagactccatctcaaaaaaaaaaaaaaagtaatgatataatatgtggcttttactgtctggcttctttcacttagcattacatttttaaggttcatttatactgcagaatgaatcagtacttcacccctttttatggcttaatagtaattgattttatttatcagttggtagacagttgagttgtttatactttgactattatgaacagtgctgctgtgaacattcagttgtgcatgagtttttttgtggacgtgtgtgttcattcctctcgggtatatacctaggactgaaattgctggatcatatgttaattctgtggttaacattttaaggaattgccaagctgttttccaaagaagcggccccattttacaatcctaccagcagtatggtagagttcatgtttctccacatcttcaccaacatttattgttcatcctttttatttagtcagcctggtaagaccaatgatgctgagcatcttttcatgtgcttatcagccatatgtgttttggagaaatgtttcttcatattctttgcccattgtttaattgggttgtctttttattgttgagttggaagagttatttatatattctaaacatgaatccctttatcaggtacaggatttgcagataattttctcctattctgtgagttgtcttttagtgatgccctttgaagcttcactaattgtaattttgtaaggaacaaatgtaaattttataccaggctgcactttttgcctgttcggttttggattttcttattgttggtatcattcatgaaagacttagcagcatttcattggttaaagctaacttcaattttgaggaagtccagtttgtctttttttgggaggtcggtcacttatgcttttggcgtcatagccaagaaaccattgccaaatctaaggtcatggatattcctttgttccaagaattttaaagtgttagcaactacacttaggtctgtgatcttttcgagttaatttttgaggtctaatttctattaaaagtgatctttagtcaaggatattgaagtataaagctaaaaaaaaaatagccttgatttttctaaaatggactgtgatactcagctctgtcctgtcaattactagtcacaggatgctaaaattataggtttagttttttaagggaataaataaatgcctcaatctcaaattaattttgctctgaaattgagctgactactaagacgagatccaatttaggaagtgttttgacattacccccagtgagcaatttgagaagcacataagcaaaaataagaaagcattcatgtgggctgcttcatagggtttttttttttttaagtgttgtattcaaccttatgagaaacacttgaaagtatgcaacttgattgtctgcccatacatacatatgttcggatgtgtaggtacaatttctgtagttttactcagggagtaagtgatgtatctcctcaggttcctaataattcccttttcaaaaatgaataaaataatattagatacctcatggggttcttgtgaggattagaaaagtttattaaaagggttggaataaacctgccacttagtaaatgcttataaactgcttactgttattaagtattccatttatttatcctgctatttccagtacattttagccaccagcataatcagtacttctcacttaatgttaaatactgctatatttttgaattattgtataaatatatgctaattatgatttttgcctgcagtaaaggaataataaacagttctcatgaataacttaagtctaataatgtttttattgttttataacatatttttcatctaattgtaattacttaaattcagaaaagcaattgtagaactgggtagcagagtgttttggtgtgttacttgtcctgaatcacgatagtttaaccaatgaaatgatgctagatcttctgtgaatgcacccaaaataaaaagcaaaaccaaatgggcaaaaatacagtctcatataagatttacatttgttccttataaagaatctaaggtatttttattttttatttttctttttttttttttggagacagggtctctttctgtcactcacgctagagtacagtggcaccatcatagctcactgtagccttgaactcctgggctcaagagatcctcttgcttcagcctccagaatagcagggactacaggtgcaagccaccacgcccagctaagttttatattttttttgtagagctggggtctcgctatgttggctgggctggtctcaaactcttggcctcaagcagtccccctgcctcggcctcccaaagtgctgggattacaagtgtgagccactgtgcctggccaggtgtctactttctctcccagaccaaacaggagaaaagttctgaatttgaaagggaaactcatggagcattttgaagatagctttaggccaattatgagtcagtttttctagcttggagttcaaggagcaaagacggtttgtttggatggatgacctgtggaaggactaaatccacctggtggaaggttcaggatgacaaccccatggacatccaggtagaaatgaaatgaccactgggcatcagcatgagagggagggccatgaagtttaaatttgagaggaggagaaggattggacaatcaaggttgtaaaggtagcttgaggccagtttggacttcattccatatcttgctctattctacaaggagtcagatttgcctatgaatgtacttatgtagcatggagcagcaaaatagatgtggatttgctaacacataaagctaaaatttaatagaccatccccactgtcttccaggttttcaattttactgccctgcttgctggcttctaagaaatagtttagcttcttttaccatcactttttagacattctgtgatttctctctgacctgttgtttccaaagcaacagcatgtggccagtcaaaataggatttcactcttgtttgtggagctctgtagtaattaggaaaggattcgaaactccatttgaaacggaggctggtaatacaatgatgtgttggatgtttctcagtggagaataaggtgctccaaaaccatggcagcaaaatactaaatgttgtgagagagatggtgatgtcttcctctgtttgtcaccattatgggaaacttttagatgtggattaactttgcacagatggagcggtgcaaggcaaggaaggttatcctgggggagctgctttggtggagaaaacctggtgtcctgccaaaccttggccttcagagtgaccctagggctggtcttccacattgtggaagagacagacctgctagtcttgtgatctctactcgggggcaatgcactgaagagaaatgcttttagttttgagtaaagagatagtcattaaatattggcttcagctattatttatttatttagacagagtctcactctgttgcccaggctggagtgcagtggcacaatctcagctcactgcaacttcacctcccaggcttaagcgattctcctgcctcagtctcccgagtagccgggactacaggcgcgtgccaccatgcccggctgatatttgtatttttagtagagatggggtttcaccatgtcagccaggctggtcttgaactcctgacctcaagtgatttgcctgcctcagcctcccaaagtgctgggattacagcaggccactgcgcccagctgccatttatttttatttttataaaaatatgtgtaataataagacagaaaaaatagggagtagacaaaagaagtaacttaaacatagtggttctcaatcagggatgattttgcttcccaggagacacctgacagtgtctggagacattttttattgttatactggggctggagggctgctactggcgtctagtgggtagaggttagggatgctgctcaacatcctgtatgtactggacagacacccccccattaccaccaacaagaaagagtgatccagcccaaaatgccagtagtgccaaggctgagaaattctgcaagaatccacccctaacacataataatcccacccctaattgcgttatgatggtgtattttctttcattattttatttccacattatacgtaactgtgtacttagtttttttgtatctggttctcttcattgagcattatatcctaacagagtaattttgtaattttcaaaatttttaaaattcacacatttctctcctatactacatatattctaatttactgctgttgtgaataacctgtaatgaataactttgtgtatttggcttttctttttcttttaatttctagttatttcttaagggtagtatttgtaagttgttcatattatttttctaagtggtgaattttttatgattctcgacagatgtttccaagttgctttccaaaggcatggtactaatttcagtgtcatcaacaatgtatagactttctgtttgcttgtgtttttgcctgcataaagcataaagttactggggaaaagcctatttttttttttggctaagtcaatgggcaaaaagtagtatgtgtttgattagtaatgcttttgtgtgggagaaacactgttctgatcattgtcgtcacaaccctcagaagtcatgataaaaccatctgtttctgtttaacaaaggctctgagagttattctaggtcagtggaatgatgcctttctgtacttactgcgaagaagtttattaagataaattgcgatagtttcaactttcttggagtacttttaaaagagcaagatccactcagatcatcatggaaaatcctgtcaaactctaagaaaattgtctaggaggccgaagtgggtggatcacttgaggtcaggagttcaaaaccagctaggacaacatggtgaaaccccatctctactaaaaatacaaaaattagccgggtgtggtgatgtacgcctgtaatcccagccacttgggaggctgaggcagaatagcttgaacctgggaggcagaggttgtagtgagccgagatggtgccacttcattccagcctgggtgaaagaacaagactctgtctcaaaaaaaaaaaaattgtttttgatgaagccattaatgttatagttaaaatatatttaggtatgctaggactccattgcactttcctattttttatgagttatttgtgtatttaatggggcacctagcactatgacatttcatatatgtagaatatatatatatgcttgacacacggaatgctcagtgaaaatgtattaaatatgaacgaacaaacttctgcccgcactttagggccaagagtataattttctgctgtaatgatgacagagagctatagtggagtgtgaccttttgatgtactgctggtcctgattatagtttacttgactttgaaggcttgatcaggaataaaacctccaattatatcactttttcagtggcaaacctgttttatggagtagtgatttgtcttgcaacagggctttggaaactcattaaaaccagggattttctcgcacatttcctaagagaattacaaatatgaaaagctgtggataaaaattatctgatttttgaagatttgctcatttttagaataaaacgttttcttatattttcatatcatgttttctaaatttttattctttcttgagggaaccattccaagttgtacaagtacgtttctttaaatatttgcatttgacaatgactcccttctctggttcttctaacaccttaaatgacttttttttttttgagacggagtctcgctctgtcgcccaggctggagtgtagtggtgccatctcggctcactgcaagctccacctcccgtgtttatgccattctcctgcctcagcctcccaagtagctgggactacaggtgcccgtcaccacacctggctaattttttttatatttttagtagagacggggtttcactgtgttagccaggatggtctcaatctcctgacctcgtgatccgcccccctcagcctcccaaagtgctgggattacaggtgtgagccactgcacctggctgactgttttaattactagtatgtgtccgtaaatgcctgagcaggggttttgagaactgtgccttcctcttctttgacttttaaaactgatttcttgtgcagtattatctttctgaattatgtagcaattttgctttacccaggattaggtgtgctcctctgggttgggtggttgtgtagtacatcatgtgatcagacagcaggcatggaccaggacggtccctggcaggcactgtgtggggctcaactccttccttcccttgtcttaccttactcactggagcatttgttgctttctctcctctcagcccatcaacctagagttgagtaggaaagagtgcattgaatcaagtatttaaattgctctgatggttttgtatgtgctatagaaggaattcgaagacagtttactttttgtcattttcatgggaatcaagaacctcatttaatcagtagcctggtattagttctaaatcatccacacatagatgtggggtgattttggtcatgttattttatagggcattgcccttctcctccagccaaaatatttgtaatacaaagcccatgattctgtcctctctctgtctctggtttcattgataaacttgtaatattttttataaaaactcttttaaaaattaaaaatagatcctggtatggtggctcacacatggaatcccagcactttgagaggccgtggccagaggattgcttgagcccaggagttttaggccagcctggccaacacagcgagactcttcctgggcaacatagacgctgcctctacaaaataaaaataatacttgatagaaaattcaaacagatggaagggcacaattattttttttccgagacggcatcttgctgtgttgcctaggctgcgtggcgtgatctcagctcactgcaacttctgcctcctggggtcaagcaattctcctgcctcagcctcccaagtagctgggattacaggcactcaccaccacacccagctaattttttgtgttttttagtagagatggggttttgccatgttggccagactggtcttgaactcctgacctcaggcgatccgcccacctcggcctcccaaagtgctgggattacaggtgagagccaccgcgcccagccaggcacagttatttttaagtttcttttcccatgctataggttcattttgcagatgtaaccgcttttgaagtctcgttgtgtcgtttaagaactgcttttgaggtatctctgccctacattatatcatcctacagttctgagacttgcttttttcattaacagtatagatcttggacctctttcaccatcagcacagagacataacttattttgcaattgttcagtagtgcttcgttgtgtggatgtgccaaaatttatttaagcagagcccagttgatgggcatttaagtaaaaaacatgccgtgttttgcctttttaaaacaaagctgcagtgaatatcctttgactgcctggatttgaatcttggctccagcagttgccagttcgtcgactctgagcaagttgctttatctctcatgtctgcaggtttcccctctgtaaaatgggaatattaataatatatgatgggtatgtagaataaaatagccagtgcatatgatacccagaataatgcctgggacacagtgagtgatcagtgatcattagctctgtatggctgcctgtgcctttgcacacttgagagtaagtcagtcaaataaattcctaaatgctgaattgctgggctgctggttcaaaaaatgtacaattcaaattttggtggatactccctgttgccctacacacattataccaagttattcttccactagtaattaaacttttaacctctaaaagccttttttttttcttttaatgtaaggcttgaaagcaagaacattccttcattacttcctcctacttatctttactcttggccttactacgtcatgacacatcttatgaaatactggtgtgataataagcactttgtgcagccctaccatggaagaattggtgaaaatgtaaaggttctcagtggtcttcagacttgtgtttgagtttctctcttgcaacaaggtgcctgactaagagagtaaaggttacttcctgcatgtttaatggggcttgatatttgcatatgggcaggtacatcctgcttaatgaacagtgttgggagccatgtggatgattgacatcaacttgtagtacaacaggaaaacattcctagattaatgttccttttcactgggtagggctagagggcaactgcaacgagtgaaatgctaggctgcaggtagatggcttgtcttgagctatgaataatatgtttggcagcagcatgggcagaaaagttgagatttctggatacaggacctggtgaagcaggttctgtcacagggtcagatcacctctaacacctggccatccccagtgcaaaggaaaactaggagagagagaagtgagtataagaggcagctgagggactcttgacaaagttgagaaggatctggtgtcctgggagagctcctgtcttctggaattagtgatgcatcttttgtggaggctcctgatggctcagtaaaaggagcctttcatcttgcccttcctacagggctgagaggggaggggttcttgggacaagtggcttttagcagagaacaatagaagccgtaggctgggctgtcacttgctttgctacttcttagtttgtaatcatcctctgtgtgtccctgaaagtcccctggttctctctaaactgtggggctccaactgaattcctgtctgctccccaggggtgccccgcagcagttagagcagcttgttgagaaggagccgcaggggtagggcagaggtggaccggaagccggaggaggccacttgacatggcgattggagccctcccagcctgtgctttagacctgccagattcctacccacctcaccttggagtgggacatttcttttcacagtgcccaggcttaactatgctgtccccgggtccattcccaactgttcctattcaagatgtctagacctttgttccctgccttggcattttcctttcctggtgtggagtatctctttttgaaatagctatctcagcttcaacatagcagagcggaaaacctatgtctgggcttgaggcagggggaggaaaccgtagatagatccaggaatggccaaagtaagcagagatccgtgagcctggacgtgtcatgacataacaaggatatgtgggtgggaggggcagggatgacatctttagctttctgtgaaatcatagacatgctttcattattttgtagaatcaaataattttgaagatagagatatctgagtccatcgatacttacctctttttttttttctttgggacggagttttgctcttcttgcccagactggagtgtaatggcgccatctcagctcactgcaacctccgcctcccaggttcaagcgattctcttgcttcagcttcccaagtagctgggattacaggtgtgcaccaccacatctggctgattttgtgtttttagtagagacgggatttcaccatgttgattaggctggtctcgaactcttgacctcaagtgatccacccgccttagcctcccaaagtgcttaggattacaggcatgagccactgtgcccagccgatacttagctcttattggccatagttctcttggagaatttggggaaaagtatgggcctctccacaccataagtatacatgatgtacttaccaaacacgtgcatgcaagtttaggggttcacaggccctggaggtttgtctgcacatctgcactgtggggcagctgcaccttcctatacacaaagacccagggtcgtggagagacggcacttgtgtgggtcacagagttggagacagtgtaccagaagtcattggtccgcagagccgtgtcttgcattttatactccagtacgttgcttcggtgggaagggtgacctcattttttgtttaattcgaagacctcactgggaaagaaacacatagagatgtggaaggaaaaagaaaaagctgtgggaaatcgtgaattcgtggacattgatggtgaaaggttcatttcaacccttgatgggaacatcgtgattctgtttaagaaacagcatcatgtatatgcctttctaataaaacggcgcggcaccttcccacgcaacttgcagccacgaggttaaccagagataaacgtggctttccttttccttacatcttcctgcaacacccttcacaatagcccacaccaagagagttcttagggtaaatatctgtggcgttaaatttcactttaatacagaaaggctggccttgaaggggagggaagagaggagcacgactcacttgggcctcccagaggcaggcttgaggacctctcctgcagcgtagtggatggggaggaacagcacgcggggttcaggctgaccgcagctagactcctggggggtctctagctctgtgaccagagtggctctgcctcagtagcctcccctgcataaggacacctttgcagggatatcgtaaggaatggagagactgtattgaaaaatatgccggaagtatctggtttctatggggccctcagatgatggccagcatcgtcttcaacaacatctttcattgtcatcatcattgctgccatcgttgtcctgggccaggatggttggcagtgagggggtctggcatgcccatcgtgctctgtggtgctctggtgctgtttgaaacatgcgactggttcttttagagattggctgaggagcatcaccttttgtgaaccatgctgatcaagttcatctattgtttgatgttggttgagaaaatcattgatcctaacatttcattcttacacatagccttaatgttctttttaagaaagagatagaagggctttgcccatgcaaaatgcacacgaataatggcttacccacttgcaaataatccatgtgaaaataagttgcttggaataacataaaatcatgaagaggccgggcgcagtggctcacgcctgtaatcccagcactttgggaggccaaggcgggtggatcacctgaggttgggagttccagaccagcctggccaacatggtgaaaccccgtctctactaaaaatacaaaattagccaggtgtgatggcgcatgcctgtaatcccagctactcggaggctgaggcaggagaatcgcttgaacccagtaggtggagggtgcagtgacctgagattacatccttgtactctagcctgagcaataagagtgaaactcagtctcaaaaaagaaaaaaaaaatcatgaagagtggacctttttgcaatttatatatatgttttcctatattctgcgatgcttataatcatgatgtaaactaatccttctttggctgcaatagtcaaaatatagttataggaaataatattgagaagaaaaatatattcctgagctaacaaaaagccatataggaaagaaatgaagtgtgtacagtgggctctcgctcagctttttgttttttaagaaacactccattttaaagagaaaggcccagccatttccacagatgtgtttctctctctgagctgtcagtagcatctgcggttattttctggaaaatggagaggagatgccatgaacttggatttcagagttcccctctgattatcaaattgaccctcttggtgatgaatcccaccattggttcccaaaaggtcataccttagtcactttttaattatgtgacccccctggggtgcacaaaaggagcttcatggggacttcatgggcctctccactgtctgcaacttgaagcctgatttgcaaagccatcggaagagaattccctatggggtgagcagccatagttggcaaacagctccaccaccacagccttggagagggagggcggtgcagactgacccatccaaccaagccaggagtcaacgctggggccatcagcatgcgaagcaaaggaaccaagtagcagaggaaactcagcaaccccaaagagctgctgagaagaaatcagaccctcctgaagacttctggtgcagtccactgctggtgtaaagagagattttccattttgacagatcccatggactcatcttcagcaaaccattgggcagggaatcaaaagtcatcataaagacctccgggtatttttctacatcagtcccctgcgtgctgcgagtcctgaaatggagcttggagagcagcgggtgggaggagaaggttgtcgtccctactgtttttgcttggattgtttcaccctgtccccacacgtggacagattcagccgggtgcttcaagacatcattcaacttgcatatactttgttcgtttattacacaaatatttactggttgtgatgtgatctttgagtgctccttggttcccccttcctcctcctccaagaaaagatggatgttcctctccttccttacacagctcctcctcacctcccatccaaatgccttatggcatctccagtggtgtcatctgctccacattggccaagggtcggtagggtcaggacagaggcctgttcatcacttcatctgcagcacctaccacagtgcctggaggtggaagcttaaacacttattggataagaagtttccgtagtcctcttactcaaccactagatggtcacttagtagccaaaaccaaaaccaaaaaacaacagttttttactttattggacaagcactgattgagccccttctgtttgttttttcacttcaaaattattttctttcggaaactttcaaacagaaaagttgaaagtacagagcaatgaacacttgggtattcctctgtctggatccagcaactgttaacaactcggcacacccactctgtctatctccctccctcccctgtgtgcacacacacatgtgcacagacacagcctcctcttgcgctagatcatcggaaagtaggcaccccaaccctaaatatttcagtcttaggaataagatacgccattagaaactgtggttacaggccgggcacagtggctcacgcctgtaatcccagcactttgggaggccgaggctggcagatcacagggtcaggagatcgagaccatcctggctgacacggtgaaaccccgtgtctactaaaaatacaaaaaattagccgggtgtgatggcgagcgcctgtagtcccagctacgcaggaggctgaggcaggagaatggtgtgaacccgggaggcggagcttgcagtgagccgaggtcatgccactgcactccagcctgggcgacagagcaagactgtgtctcaacaacaacaaaaaaaaaaatgtggttacagaggactacgtgctttgggagtacagagtgggaaaagttactttccaaaaaaaatggaaacaattagaaatggtttctttgagaaggtaacacgtatgctgtgccatttgcatagataccggtttacagtgtttgggtctaaaactttaacaaaagggaaaagataacagtctttcaaaaagcttactatctcctcaaaaaactcattcccctttacagtatttggaggtttgatttttatgattcctctgtggttttgtaataaccacacttattatttccttagcttctcgggctgtcattgaaaaagtgcctttaattttgcttgcatttactagtaagatttattcatgtgcagaggggccgtgtagaccagtgaggtggtgtttagtcagctgcatccgccttgctgtgcgaaatgctggtgaaagctcagtgacttggagcaacaccaaaattcaatttttgcattttaataatagcttaattttgtgattatgcttaacaattctatacatccctaaataaaagaaagtataggccattctaagcagtcagaacttcagctttttctaccatataatggagggttttgctaaatttaaaaatgtgtccttgaagctgaaaggccacctctgaggcactctggggagagtgttcgctttccaacagtcgggaagcaagcaaatggcacacaccctagaccagtgagagaaaggcacttgcaggcctgttaggcattttgttggctaaatagaggggaaatgatggaaaacaaatactgaatattggtttggggagggaatgacaacagcttgtgtgaaacggaggtgattttaaacataagccagtgggtttcagagcacaggctatggtgggaagtggtggggagggggaagcttagcaaatctgggtattggttttgcctgtttttaaaccccctttggagtctagtaaggttaaccactctggttagttcagcgttctaacaggtgactttacattggaggaagatgttcagaaggcgtggaagacacatcttcgagcagccccagcttctgatgattttgttcatctgggttgcagacccaatctgtgtcccagggactgggactggccttcattaccttattgacatgcttctcccggacacacacacacacatcacatttgcagccatctcaatttagtagaggaattacacataaccaaaacactccccaaatgtgtgctggagaacagctcggagggatgggacggcctgtcgtttcctgacgttgactgacttgagtgcaagaccccagagcctgggtgtgtgcagagggcggatagcacatgggtccctgcaggaggcctctcggccttcttccatgtgtgtgcacgtgtgtgtgtgtgtgtgtgtgtgtgcgccgtcaaatgttggagcttctggggaccaccccaggaaccctctggacaggggtgtctagcccaggcctgagtgcagcgccctccctgagggtgagggttggcttttaaaagaggatacctttggctgggcgtggtggctcacttctgtaattccagcactttcggaagccaacgtgggcagattacttgaggtcaggagtttgagaccagcctggccaacatggtgaaagcccatctctactaaaaatccaaaaattggcccgggcatggtggcagacgcctgtaatcccacctactcgggagactgaggcacgagaatcgctcgaacctgggaggcggaggttgcagtgaactgagatcacaccaccccattccagtctgggtgacagactgagactgtctcaaaaaaaaagaaagagtgacacatgaaataaggggcaagaggttctgagggagaagccttagaaaaggcagctctgttcttcctagaggagtcttagtttagcattttaccacaaagaaatgtcttttttttgaaagcagaggcccacagaagctgtgacatggctaagcttagctgtcccaggccaggatcggaactgggtgctcatctcacacctccacacccagcactagcccaaggtgggacccatgaggtgtgcttgggcacagttagggagaaagtcaggatggattggcaggggaagattcacttccgaagtattggcttagcagaggagctggctcactgggggatgagactcaccgatggcagtgtggttatttatgtataatcttcactcatcatttattccctaatcacgacatcgggcacacctgctgggttctaggtgctgagtatttgacagtggataggacagtgaaatcctgttgtaaaggggcttttcttctgtagtattggggcggatgggacccataataagtaaaccccatgatatatttaggctttgtgtccccacccaaatctcatcttgaattgtaatccccataatccctatgtatcaagggagagacatagtggaggtagttgaatcactggggcaggttcccccatgctgttcttgtgatagtgagttctcacgagatctgatggttctatataaggggctctttccccctgctgggctcttctccttcctgctgccttgtgaagaaggtgccttgcctccccttcgccttctgccatgattgtaagtttcctgaggcctccccagccatgctgaactgtgggtcggttaaactgctttagtttataaattaccctggaaagtctcccactgggaaaaataattggaacaggcagcatgactatttttagcattatttcaatatgggtttaaacttttttttaaattgaatattgtaactattaagtttaaacctaaggatatagttgctaagtatagttcttctctcactatgatttaaattatgttataaagaactggcagttctttatagcagtctgaaaatggactaatacaccccacaaaccaacaggaccgtttcagatggtgatgtgaactctaaagaagataaacaatgtgatgatggcttagaacagcagagtggaatggagatccaatgcaagatgtgcaattttaaatattctagtagccacattttgaaaagtaaagagtgagggaaactaacttaatgtaacttataaccggtatgttcataatgttaccattataatatatataaataattgagatattttgcattttctttgcattaagtcttctaaatctggtgtgtattttatacttagagcacacctcaacttggattaaccacatttcacatactcagtaggcacacttggctagtggctttggctagcacagacttagtgcttgggggcggtggtacaggtccactttagattgcatggttatctttaagaaaagtcctgttaactaagcacaaggaacagttcctaccactgatctatgttgtgttttgtttgctgctaatgtgctcatacatcaaggtaaattattattttaatccagatttcagctgattttttaacagcagttttgctgtgtgcacgctgaatgggattctccaaggacaggcaatgagaaatccttcaacattataggaggagacggtggagagagatccttatagtctttgagagaaggctttggggtttccagggcctacattttgtcagagatcttctttcctgtacaggaaagtaggtgttgcaggttccttctttttcactctttccttaattatgggaaggaattccaccaacattgatgtttaacctggaaagtctcccactagggaaaataattggcacaggcagcatgtctgtttttagcattatttcaatatgggtttaactgttttttttttttaattgaatattgtaactattaagtttaaagctaaggatatggttgctaagtatggttcttctctcacctactcagtctttgggtgggtgaaatgctacttgttgaatgaaattagaataatttccatctgagtttttcaggttcagctgcaaatgcaggagttggtttagagtcagtttatgaaggaagttttggaaaacattagagtattttgtgtgtgtgaaaattagacttgtgggaaggagtgtggtaaaaactgctagcaaacactaggcaaaatttttctaaaaatcatttgccttttccttcacgtgtaaaagtcatatatgttctttggagccaatttgaaagagaataaatcatccataatgccatatctttacagtcttttttttccttgtacctttagatgtgtatttggtaatgtagtttttacatagttttatgctgctttttacacttgtcatgtgtattttcacattttcttattttttcaagaatttagcttttaaatggctgtgtaatatttttccttgtgaatgttctgtcattcattctctctcttttttttttttttcgtgacagagtctcgctctgttgcccagactggagtacagtggcgcgatctccgctcactgcaacctctgccttctgggttcaagtgattctcctgcctcagcctccaaagtagctgagattacaggcacccgccaccatgcctcgccctgtcattaatttaatctttaattcaccctctattgttgttttttatttttcattattataagtaatgctgccatgaatacctttctacatacatatttatatgaatatctaattattgcagtaaaaactagtagaagcaatcattcagtcaaacaatcaagacttttttttttttttttttttttttttgagacagagtctgtctctgtcacccgggctggagtgtggtggcacaatcttggctcactgtaacctctgcctcccaggttcaagcgattctcctgcctcagcctcccgagtagctggggctacaggtgcctgccaccatgcccagctaatttttgtatttttggtagagacagggtttctccatgttgccaggctggtctcgaactcctgacctcaggtgatccacctccctcagcctcccaaagtgctgggattacaggcatgagccagcatgcccggccccagtgtagactttttttttttttttttttttagggcttttgatatttgttgccaagttaccctctaaaaacctagtgcaagattacattttcacccctggggtgtgagtgccttttgccccacagtctagaccatgctggatttataattttaagggaatttattaatttgttagatggtggatgtgtcattttgatgcaggactttaaggaagaaaagatatatctttaaaaacgttttctgtttttcttttttagcttgtcttttggagttcttgcctttgacttaagggcaaatgtcttactgagagatgctgggtgcctgggtcacaggtggtttgtcgttgccctttttctttttttttccaactcagctaagttcagcactagttttgtgacttattacacagaagacttgaatacatcaagggcctctagagatttgtggtaacatcaagatgtgtagtctgtaatgtgtcatggggggtgtgagccattcaaggggagttactcttaatggtaccattattcaggatacagtgctgatgcctgcatcctgatggcaccactgtcgtccaactctgtttgtgacattgttcatggcctctgcagagtcagggagctcctcaggataaggctctgtgacatcgtctaaactccaaagaagtagagccatcatatttccttccccaagggagctggcatctaccatcactgaggattttttgagtctctgtaccaggacatggacctcaactctttatttccatgattaatccctatgtcaatgtacatggcaaatgctagcatttccttcattttattgacgatagaatcaaaactcagagtgtttaggtaatttccttgaaattacacagccaggaatggccaaggctgggaattgaatggactccagaacccatggtcgaagtccaagctcaatatctctgagacctggaaggaaatgaaacagactaaaatcagagtaacgcttaaaaccatgaagattccagcccacagattctatctgccacatgcagacacgatttatacccctagagggaaactgaagaaacaaggtggtggtcatacaataatagactcaaaacccaaccacacttttgaagtgaatagtggctcatgatggctttaaacatcttaggagaaaaatcaaagttggtgatgggctaatttggaagattagctgaaaaagttaagtggcaaagaactaagtgatagttggagtgaggaaggcattttggtgtggagagagtaagattggggaaggaaagctccctgggtaactgtaggattagaagctgtgaggagtgtggtttaatcagacaatttggaagcaagacagagagggaacagtccccatttggagagtgttagtgttcagggtaatcagaaaggaagagtcggaagcatatgtaattaatgaacgagaaaggcagatggatgatggggaggtgggtggcgtcgcgctactcatatgttcttttgataagtaaaattatagcataatttctcactcattggaaacaaggttatgcaattaggatcctgctgctgctaaaagcttccagagattttagtgcactgggcagacagagtgatgatgtttactttaaaaatcgaacttctcgtttgagatacttaattttatttaatgctcgatttttgtatttactggttctgcattttctcatgtagattaagatccaatttagagaagaaatatatgggcagtttggctgtagaaagcacagaggaatgatgctgtggatattgatgcaccatgtggtagacagcattttcttttcttttcttttcttttttttttttttttgagacagggccttgctctgtcttccgggctggagtacagtggtgcgatcgcggctcgctgtaccctcaacctcctgggctcagttgatcctcccatctcagccttccaagtagtgggacaccatgcccggctaatttttgtatttttttgtagaagatgggatttcgccccattgtctggtcttgaactcctgagctcaagtgatccgcccacattggcttctcagagtgctgggattacctggctgacagcatttgttttaaagcagtaaatgaaaatttgggtattccttttaagtttttcaaaatttcaatctgcagtttttaatctatacaaaaaactgtggtaaaagacgcctaacataaaaattacaatcttaaccacttgcaagcctacagtttggtagtgttaagtagattcaccttttgaaacagacctccagaactttttcatcttgcaaaactgaaactgtttgcctatcaaacaacagctcttggtttcctcttcctcctaggctttggcagttactattctactttgtttctatgaatttgactgctttaactaactcataaatggactcatacagtatttgtctttttgtgattcgcttgtttcacttagcgtactatcctccaggctcacccacattgtagcatgtgacaggcttcctttccttttcagggctgaataatataacattatatatatggatatgtacattgaatatcccttatctgaaatgcttgggatcagaaatggttcagattggggatttttttagattttggaatatttgcataattcttccaggttgagcatccctaatccagaaatctgaaatgctctaatgagcatttccttgagcatcatgttggtacttaaaaagtttcgaattttggagcatttcagatttcagatttttgtgttagggatcttcaacatcattctatttttttaatctgtcaatgaataaaattacagttttaaccacttgtacacatacggtttggtagtagtgttaagtatattcacctttttttgttgttgtttgagatggagtctagctctgtcgcccaggctggagtgcagtggcacagtctcggctcactgcaacctccacctcatgggttcaggcaattctcgtgccttagccacctgagtagctgggactacaggtgcgtgccaccacgctcagctaatttttgcatttttagtagagatgcggttttgccatgttggccaggctggtctcaaactcctgacctcaagtgatccccccgccttggcctccccaagtgctgggattacaggtatgagcaaccatgcctgggttaactatagtcaccttttgaaacagacctccagaacttttcgtcttgcaaaactgaaactgtctgcctatcaaacaacaactcttcgttgcttccacctcttggctactcttgagtagtgtggctatgaacacgggtgtacaaatatttctgagaccctgctttcaattctttaggatagatagccagaattgagattgctggattacatgatggttctatttaattttttgaggggcttctgtacaattttccattgtggttacaaccattttacagtctaagcaacagtgcacaaaggttccaatttctctgcatcattgccaacaccttttagaaacagtagccatcctaatgggcatgaagactatctatagtttattatgtcaagcttttcttcatggttataaacgaatattgtgatgagtgatttatctatgtttgctgctttactccccaggggaggatgagtataccatatatgtccatattgatacctatctcagaatactggttgtacaaaactattccaggcattgttcttctttaagtatttggggtgtttctttttgcttataatttagtacaaatgttctcagttcagttaataatgagtcctactgtgtggcagttgagaacatgaagataaccagaacacagttcccgccctcaagggactgatgagaagtagccacgttttgtaggaacgggcaaatgaagtggcaaaggaaggtggccatgggttgccataggagcgcaggtgagggatgaggaaaggaagcactaaaccaggtcagcttgtgacgtgggataaagaaggcttcttgcaggtaaagccagagctgaatttggaagatggtaggagttcacctgctaacctgggaggtgtgagtggagtgcctgcggctggacccactttgagcaattggaaagcctgtataggaaaccataggtgacatgatgccaagtggacatgacattcagggagatgataggcagaaggtgaggccaaagaagttggctggatgtatgtcagagaacgtggtttttatgcaatcattgatggaaagctcatgacgcattcagtgatgtggacggctttgtgctctctgcagaccactctgagggcaatgtggaggtggaggcagagagattaggtaagaggtttttgtgaaagttcaagtgagataaggaatgaactagggcagtggtagtaagaatgaggagaagggagaaaacctgccaaatacttaaaaaaattagcagccatatgccggttaagtgtatgagtggtgagacagagggaacattgaagataacccacagatttctggcagtggttccgtgatctgaaattaggaatataagaatagacactgagggtggacaggatcaattcccttttggacattttgggtttgatgtgtctgtagaagacacaaatggtgatgtccagttcaccttgggtttgtgagtcaaatttgacagattcagatagagacacactcttggttcttattagatgtatgcagtagttaaaactatgaaagcagatccatcccctatgttggaggggcacaaagaaaaggagcagcccaccaaggagctggagaatgagaatcggggtggaccaagagggagtcgtgtctcaggggctggggaaagtagaaaggttccagaatgagtgagtggtcaggaacttcagatgtagcaaaagaggtcttagaatgtaaagatggagtcacttggcagtgtcaagatacaaagactgaataagtttggcagcgtggagataccaggccgtgtgaagatccttaggacctttgtccaggcggttttaggagcttggtggttgtgggaaactaatttcaggtaaatgtttataatggcagtagagtgactatggagtactccttcaggaaacttagaaggaaagagagaaaagtgaaaaagaggccaagaaatttttttttttttttttttttaaagaatatgagagacttgagcatgttacagggcaagggaagaggttgttgataattaaagtagctgacattttggagggcttgctccatatcacctacatccaacagctgtatatcaaagagctcatcaaatccatccaacaagtctgaggtgttgggacaattactgttcccagtgttatgaatgagaaactgaggtacaaggatgtcaagtggctctgggtgacaccagcaataagagagcccagtttctcataacctgtgtagatgtcaccatttaccagagcactgagatgtttgctggttttgagggagaagttgaagatttagggtaaagaaggaataattcatagaaccaagttctagaagacactggaagagatgggctgaaagctttgtgaaatttgtttttttaaatgaagatgaaaagtttaatcataagggaaaaatagggacagtaaacagagttggatagagaaagctcctaaatattggagcctgtcctggctctgcctcctgcaagaacagtggttttggtttcttttctgcacaaggtggtccttttagtcacatttattgattgattggtttctttattatcacggtttgagctgtcattgagtatgtgacattctgttattttaacagtgttatattaagaatctactctatgtttgggttattttcagtccagtgacttaaatgatagcatgccctccattcttggtgacttgtgttgagaaatcttatgctggggacatattgaaattgttgcaatgtggtttaatattacatgttttaaaagctaagaagctcctattagtctctgaaatatacctggtttccaatttagtctacaaaggagatatcattcctgaccctgatttagtgggagagacagagatgcctatatattggatgatgtattattccatacacacctacatacacagctctgtaatgtttaggaggcttcaacaatgggcagatagaaacctgcagctcctattgcattatagctcctaaataaggtgttagcatgattatttatgaatttaccctgtgagctataattcaaatccttggccaatcaaagggaaaaataaatcactgggagtagtgttttacttaaaacccattaaagcaatttaagtgaaagtttttttcaggtatgaatacctagctccctgcaggagggcaaatgttgatgtagggatatctttattaatagtcttggtgaaactgaaggagaaggcatacaatacagtctttcacagaactcagcagtagccataaatccatttatgaacagttcaagtaatagagctttgaagcataacattagttttcaataatgatgttattcttttaaaaaatcagaggtttaaatgtaatgcatggggaaatggggcataataaatttgaataagtaagcattacttttcagtggatccagcagattccctttttattttatttattgttcaggttgttgaattttgtttattcaaatagtaaatgagacatagtccagggaagagccctttgcttatgctatatgatttaaggccagctgccgtttttcctgagctacatacgcttcatcatgttggaggaatcaacttcaaaagtcagctggctgttctgcagacaagcaccagacttgttattcaccctgaatcctcagccttagctccccaatctctgttgcacagaaaactacaattcctgggtgcctggaaagagagggacaaatattaatttgcatgacagtatcctgtgcaggacctcgtgctaggagaagcccaggaaatgtttgttggtagttttcactttgtcttgctagaaaagcctctacaggaaatctcctctgcttctaggaacgtcaaatttcaaataatcctggccaagtagctggttcctattcttgactccttcatgggggcggcggaggggaaagcttcctatgataatacattgcagcattacgctgcccaaagtgccaagggcggttgggtactattcttagtgtttatgtctttagttcttgttcttttacttacttatttttggcagattactgtttacaagcctcaggaagttagcagcaagcttgtcccttagtccttagcaataacgtttgagaattgctggaacctgtttgtcttgttagcaactacccaaatacgaagaagcaaggctgcaaggcaagcaccaaacttgttattcaccctgaatcttctgccttggctcctcagtctctgttccacacactcccatgctggctgctggaaaggatggtaggcctttttttttttttttttttttttttttgagacagcgtttcactctagtgcaggctggagtgcagtggcacgatctcggctcactgcaacctctgtctcctgggttcaagcatttctcctgcctcagcctcctgagtagctgagattacaggcgcacgccaccacgcccggctaatttttgtgtttttagtagagacggggtttcaccatgttggccaggctgatctcaaactcctgacctcaagtgatccactcacctcggcctcccaaagtgctgggattacaggtgtgagccactgcgcccggccaagagaggggtaggcctttttgatgggatggaaactgctcttcctgggatttcagcccgcccctatctctcccatcaggagagaaggcagagcacagtgattgtccatgggctggtctctgttcacttccccaaggtgccgacactgcgtgcactccacacgtgaggcaggtgtgggaatgaagctgcctgaaggccgtggggatttcacagctggtgaacctgctgtccctgaagtgccattacttaaacccagagttttctgctcacttctcattttattgaaaatggtgcattggcaaagtgatgttgaactggaactgacaaccagcattgtccctctgctttcctcagactaatccacgggctgtccactcccctgtgatgctctctggatcgggtccagcccttgctttccttggaaaacactacctatatttagtggtaccactagatcttctagcatccgttttctgttgctgcatattcattaataatagggagaaaaaaaaaaccaacccttgtgtaattgctatttgaatttcacagatagagtagacatttaaagatttagttggctttaaaatgtaaatttagaagttcctggtaggcaaagcatgtttctctaagggtttataatccaatcattcaatccctattcctttacacgtaaaattaatcctttccaataggtacaaatgcctgaatggagaagatggaaggttcttggcagatggctatctgtgctcttcattggcaattttttttttaacttgaaaaagtcaagcattttggtaggagaatatgctttgctggactctgccaagtttcttgtggctgtgttcctattagtgggcttcaggggcttcctgtggacaattattatggttggtgtggaggaaaaatggaatacattattttcatcttttcattaaaaaatgtggcttccttcccttttctccagccagctgtcagatttgaatgcctgccctagtttgctctgtcatcatcgagttagtgggttgagtgatgggagctggcagaagcccattagaatgattgccagtttccaaacacaccccgaatcccttgctacagatgtctaggaagacgggataacagaaatttgcctctgggtttcagtacattgatttcttgctcattttaattacaggtctcccattaaagaacggggtgggggagggaaagcagctttgaattaaaaatgtgacttatttatgggtttagttgctttactatgaagacttgctctaaaaagaaagtttcattggatgctcttaaagttctttataaaaagatccccattgtacagatgctgacaacattccatgaacaaaaggcttatctggatcacctaaaggtctgtctggaatccaaaataaaactggtgcccaggtggctaattatcactttctgtatcatgcctggaaaatacacagcctcctttgccaagagtctatggcagggcagaaaacgctgcccaggcagcttcatgtagcattgtagcttttccaggttttttttttttttttttttttttaaatgtcatagaaaagataccggtggatatgaatcctttgtgctgaagttggatggcagttagaacttaaaatttaaagaatgcattcgatcagttgggctaatccgtttgggtggttggagcctgataccaggtaggtaaaattacacagccatctactttcattcttttccacccatttgccatgccctgcactgtctgccaggtgagagagggatgtcagcttagtgcagagttttaccacacctggagaaaagagctcctgtctgcttctaagggactgcgaattgctggcaacttcttgatctgtagaggacacttcctttccaggaaatctaattttgagaaaacgattgcacttctaaagaggtctttcccgtgtgatctctagacactcttcgttgctttaaaatgaaagcctgggttttaatatttttacatcattgcatagattcagagcaactaatattttgcttgttcagtggacaccttgttgaagtatgagtaaatttgtgaattgtagtgtttagccaacctttttttttttcccattggttttatccgtcttaaaaaggtttggatctgtgccccacccaaatctcatgtggaactgtgatccgcagtgttggaggtggggcctggtgggaggtgatcagatcatgggggcggatcctttgtggatggtttagcaccatcaccttgggctgttactgtgatagtgagttctcggggatctggtggtttaaaagtgtgtagaatcttcccctgacacttgtgcctgcaagaaagcttgctccggctttgctttctgccatgattgtaagttttctgaggcctccccagaagccaagcggaagccactgtgcttcctggacagcctgcagtaccgtgagccagttaaacctcttttctttataaattacctagtcacaggtatttctttacagcagtgtgaaaatggactaatgcaccatctatgcattatttatttggacctaaatatatcccaggaattgtgctagactgaaaatatagtttgtatatgcacatttgaagttcatgtgattctgctactctgaaaaatgttttgcattttttgtttaaaaaaaaaaagtagatttccttttctttacagttaaattagcatattagtttaaaaaagtgttgtattttatggttcattaacagaattttacgattttctaacttgccaaggattatggtgtttattcttgaacattgcaagccccattgaaagtttggatgtaacataggtatagatttttatgtgtgtttcttagaaataacagataagcagtttaaaatcattgcttccataaaagctgaaattcgtctttttgaaataggttgggtaaggatttgagcatttatgtaatttgttgttggaaccacccatcctccatggaggttatgctcaattacgtattataaaaattggcattgacactaattcactttctgtatctcttttggatagatggatgatatacagcataagaaagatttactggaaaagatgctgtaatcaaaataggttgtccaaggcaactataggttgatagcgtgttatttgcagataaactgaaattttgaaagaaagaatatttggaaggaaaagaatttcaatccgattatccagtgtttttagaccttctggctatgagattgaattgactatatttcattgactgttaattaattagtacctttgtaatggtataatttagagaactgcattttagggcattactttagtctcaaggttgtcaaatattgtaacttgagctttgaaaactagtttgtaaaaatgagggaatacatttaatccatgtcaactaatttgaatcaatgacataaaatacagcttgggcattaaagcaccgtgtatatgtttgcgtgtgcttgtctaactgggactgtctatgtcaatcttctgttaccttatgcgttgtttggtttatctagctttttaaaaaattggttatagtcttacttcatgcatttttagcacaaatcttcatttcattttaccttcaccagtaataagagcagaaaaagaggtcagcaacaaataatttgctgctcattagttgagttgatgtgtgggaagtatagcacttttgattgaaatggtggttgtcggccgggcgcggtggcttgcacctgtaatcccaacactttgggaggccgaggtgggcggatcacaaggctaggagttcaagaccagcctggccaacacgatgaaaccctgtctctactaaaaatacaaaaattagccgggcgtggtggtgtgcgcctgtaatcccagctacttaggaggctgaggcaggagaatcgcttgaacccgggaggcggaggttgcagtgagctgagatcacgtcatcgcactccctccccagtctcaaaaaaaaaaaaaaaaaaaaaagaagaagaataaatagtggttgtcagttatcagaaaaccttaactttttggtaagtttttgagttacctcttgtaagtaaaggcttgagggagtttaggaagcactgtgacgtccactcatgaaagacagaatataccagggctgggatgggatggaggcagggggtgaataagacttaggggttcgttctccctttctcctcaggttcacttgttgaaagtcttggatgcttctgtgaggccttagggggtaccatgtctaacttgtgccttctctatttttgcatacaaggcaggtgacacctccttgtcttggactcctgtggaccatgtctgttccattgatgaattagcatttatgatagattatttttctagggatggaaaaacttaggaaagccaatgcctgttgcctgcattagtatacctgatagctctgtacaatatatgctgtcactctctcagatggattggaagtattagaaactatcaacctctcaaaattctgtatttgaaaatagtcttgtattttagatagataaaatcagaagtcttcaatattctgagagctccacatagaaatcagactcagggctgggcgcggtggctcacgcctgtaatcccagcactttgggaggccgaggtgggcggatcacaaggtcaggagatcgagaccatcctggttaacacggtgaaaccccgtctccactaaaaagtacaaaaaaattagccagacgtggtggcaggcgcctgtgtcccagctgagacaggagaatgtcatgaacctgggaggtggagcttgcagtgagccgagatcacgccactgcactccagcctgggcgacagagtgagactccgtctcaaagaataaataaataaataaaagagaagaaatcagactcagttagtagatcgtgctggtctgtcatcatctactttgttcactcgttcgtttgtgtgttcattcctttgttcaataaacaagtaccagctgttggcctcctagtgccaggtgctatgccaggcttggagtgaaggtgaggactggttcaatatctccccagtccctttcactaaactttatagcaaatatattaatggatttctaccttgggaatctctctttaattttataggtgataccaacagagattttttttttttgattaatgatttttttgtttgtgttttcattatttggggatgctttttcctatttatatgaggaatatttgtacatgatgaatactgtgaacactgcaaaaagatttcccatgaatgaactcacaaatggaaactcagacgtggctggtctgtgttgcttgtcactgaaaactggactaagtcattatagcttttccttgtttgagggatcttttgcagttgctgaaactgctaaataaacacttcaatataagaaaattacaccttagcttaaaaaatattgttatttttggtttctgagagcagttatataaatttccttccaattcattgacattgttaggtagttgaactttttgtttgtttgtttgtttgagacagagtctcactctgttactcaggctggagtgtggtggcgcgatctcggctcactgcaacctccacctcccaggttcaagcgattctcctgcctcagcctcccgagtagctgggactacaggcatataccaccacgcctggctaatttttgtatttttagtagagacagggttttaccatgttggccagactggtctcaaactcctgacctcaggcgatccgcccaccttggcctcccaaagtgctgggattacaggcgtgagccaccttgcccagccaggtagttgaacttttgaacttaaccagtaaattactttttcatgtgtgcgctctactctggacaggagtttgcttttgctttgccttagagatgcccttacccacccacagagcctgagtgagctgatctgtgcatagacttagtattttccatgtttgataattgtatatattctctgttaattctgtttttgttttgtttgttttgttttggggacagggtcttgccctgtcgcccaggctgaagtgcagtggtgcagtcatggctcactgcagcctcaacctcctgggctcaagcgatcctcctaccttagcctcctaagtagttgagagtatagttgtgcccctgtagcaccaacatctggcttttttttttttttttaagatagattctttctatgttatccaggctggtcttgaattcctggggtcaaaggatcctgccaaagtgctgggattacaggcatgagccactgcgcgcagccatgcttgcaaattcttaagtctttaaaaacagcagtctttggtcttttagacacacttagatgttttgagattatctgtgtacttattgttttgttaaaaaaacaaaaaaccatgaaaacccatcctgaagttttagtttgcctgccctctgggacagctattctcaaggcatggtctgtggactgccgggagtctacaagaccagagggtctttaaggccaaaccacttttcatggtagtacttagatgcttttgttgttttcactgttgacagttgcccgaatggtgcaaaagcagaggtggacgaaactgcttgtgtcttggtgtgagtcaaggcagtggcacagccactagcggccgtcctgatcttcccctcccaccaagtgcagtaataaaggaaaagagtcagtttcacttgagagtggccttgatgaagcagtattaatgtcattaaaccctgactgtgctgcagggattcttgtctgagcaatgggccgcctactttctggtaatttttgagaatattaaaaaaaccttactttttattactttttaaaaatattctttgtaataaaatgagaagtatggataaagtgcctctggacactgagagatcattatttttcaggaaaaaaaatcttttttttttttttttgagtaatgaatggaactagccactattttcatggaacatcacttttacttagtttaattaattaatttacttaagactgggtcttgttccatcacccaggctggagtgcagtggcacgatcactgctcactgcagccttgacttcctgagctcaggtgatcctcccacctcagcctcccaaggcacacaccaccacatccagttgatttttgtatttttgggagagacagtgtttctccatattggccaggctggtttcgaactcctgagctcaagtcgtccaccaggcttggccttctgaagtgctgggattacaagcgtgagccactgcacctggcctatttttaaaatttctatttatttatttacttttgcacttttacttaaaagagcgactgacaaatcagtttttcagacttgggcatttgtcagacgttttctttaaaatgaataaagttaaggtgtcacttcaagggaaataaccctgagtatttgtcctgagccccaggtttgtgaacatctgcccttggaaaatgggagagtccacactaggagctgcagggacccatttgccccacaaacttctgcaggggtttatgtctgagctatgtgccacctgctttctggtgtccttcctttgtgaatttcccaagcgcttttgacttactttagtagcgagatggctgtgttctgggtttgggttagtagtttcatgaagatacaccacccttcctcttcctctgatctgtaagagataggaaaaaaccaaagtgtttttcctattctaatccagatcacttcctccatggtctctaaaacgtgaggatttctccacaccagcagccaatccgttccccagcagataccagccattagagatgggaagaaccgaggcgttcttcctactctgatgcaccactcaacacaacacttcagataccagatatgtggagattctgcaccccccacaacacacacaccaagcaattctccagcagacaccagctgtgtagttcagttcagttctgacgctgcccacctggcagtagtgtcagatcccacaagttaagggctcagtcccaagagactactgcttctctcctcagatgccaacgtaaatcgccagattgtgacctgtgctcctgactgactgtctctaactttggcttcccatcaccccttctcaggctcagttcatctactagggcagctcacagaacttaggcaaatacttatatttgctgatttattataaaggatatttcaagggatacagatgaacagccagaaggaagagatgcacagtagggcatgtaggcaggggggtggagtatccatgccctttccagatgtgccagcctcctggcacctcagcaaccaggagcttgtctgttatgtagacatgattgattacatcattgaccattggtgatcaattcaacccgcagcctctctcccttccccagaggtcagagggtggggttgagagtttcagcctctaatcagatgattttcctggcaaccagccacctacgcatcaggagactattgaggagcccaccaagtgtcgcctcattagaacaaaagaagctcccattacccaacagattccaaaagattttgcagctctgtgtcagacactccggtctctcaggaaattacagagctcttatgagctctgtgttaggaactggggtcaaagattaagtatcagggctgggtgtggtggttcacgtcagtaatcccagcattttgggaggccaaggcaggcagatcactagaggtcaggagttcgaggtcagccttgccaacatggcaataccccgtctctactaaaaatacaaaaattagctgagcatggtggcaggcacctgtaatctcagctactggggaggctgaggcaggagaatcgcttgaaccaggaggcagaggttgcagtgagccaggattgcaccactgctctccagtctgggtgacagagtgagactgcatctcaaaaaaaaaaaaaaaagattaaatatgagaacgaaagatgcatataaatagatagggacgtaatttccctatctatttataagggtttcaggagctctacatcaggaactaaatgtataccagtgatatggtttggatctgcatccccacccacatctcataggaattgtgatccccagtgttggaggtggggtttggtgagaggtgattagatcatgggggtggatccttcaggaatggtttagccccatcaccttggtgctgtgagtgagttctcacgagatctggtcgtttaaaagtgtgtagcacctccctgctccctctttcttcctcctgcttctgccatggaaaatgcctccctcccgctttgccttctgccatgattgtaagttccctgaggcctccccagaaacgtgtcaccatgcttcctgtacggcctgtggaactgtgaagcaattaaacctcttttctgtataaattacccagtctcaggtatttccttatagcaatgagagaacagatgaatacaaccagaggccaaatacatatttcttattacacagcatcatactttgcttcacatgtgtataaccaaggatgtttttgcttgtcttatatggtatgaccagcttggcagtggatctaaccttttaggacttttgctactaactctgcttggtttctgtttgtgtgtgacaatgtgattcaagcagatgttatagtctggtgaacgccaggtgtactgtactggagaaaatagaaaaagtcaggggctggtttgatatcttgtggtcttcctgcatgtactatatgccaggagacttacttcatagtaagacatactatgaagccactagaaattgtttttaaagactagtttagtgacatgatgttaagaagagtggcaaggtacaaatgcctataaatagaccagaatgaaaatatacttaaatgtacctggagaaaaaggccagaaggaagtgcgccaacatgataacgtttatctctcggtgctcatagaatgagtagttttttttttctttatactcttccacattttccaaattttcacaaatgggcttggattacttttataatcagtaatttaaataaaccttttaaaagcacagcttgtctatatttcatagtaaagtctagataatctctgctgactttaaattcagcagtattatatacttaactatgattgagctaaaagatgctgtcattgaatttttaattttgatacgatgtccatttagaaaataagttagaacctcctttggactttttccctcagtgaacagcttatatcaaattagcatgaggttgattctgaattggctcacacttgaagtgaatgtcctttgtaattttcaaagtgatcagtgagggattagaagcttgctgtaaagtggcagtttacctacacttgctcagctgtaaattattaacttttggcccaaaggtagccctggaagtcctgagctattcattcaggagcacggtaggcagaggccaatgaccttaaaaccaaacggccagatttctaagcgcagtcttaaagcattcttctttgtttccacaaagatcaaagatatccttaaatcgatgttagagaaagcgttcaaagaagtgttcagcttcaaagaaaaaaaagtggtaagctttctagccctttccagctcgaagtgccctggggtctgttggtttctgggtaggttgggcgatagggactttgcctggttgccttttttgcgtctgcttcctcatctgtgaaatggggataacaacagtgcctgctcaaacttgttgggtggactgaatgaatccgtccatataaaatgcctggcacataagcactcatcagctgttgttataattaaggtcagtccttgaaaggcttaaagaaacctgggcaggaggctgctgtaagtgacaagccacccacactgtcaggctgcatgcattcccattcgttaggtgcctctttgggaattctggatactgactggcacacagtgggcattctgtaaatggtggttaaatggatgaatgaaccggtaagaccccctccctcactatgggtttctcttactcatctgtaactaattccaaagtctaccatcatgaaagagcctgcactgttgtcacctgcctctactgaggtggctgatagactagctgctgctggtgtctatcacacaggctacaggtcctggacccctgcaggatgggcaaccaccatcctgactggctgagagtggacacccaggaaaagatgggtgtgggccatgcagaaagctgcagcggaatggcattagtgcaactccacgtgtgtgcccgacgtgctggaacagggagagggaagcagaggcagcgtagtgtcagaagcgtacacaggcagaggtggctaggggagtggggagcatccatgtggccggcagctggggactgacaggcacagctggatcctctcccaccgtgtagccacctgcccaaactccactaagccttttcaaggactgaccttaattataacagctgatgaagcttattgtgtgctgggcattttacatagatgagttcagtcaatccacccaatagtctcaagcgggtgctgttgttatccctagtttagagatatcaaagaagttgaacaagccccatcacaggaaaaaggaggtgctgggatttgatccctggcagcctgactctgaagcctgtgtaaccttgtgcttcctcctcctgctggaaacatcctgttcctgtgtgtggactgcacaccccgggtgccagaaacctcactgtggattgtctgtctgagatctaccctgtccatgtgtcacagtattggaaaaggttctggaactctggcctttgtctcaaaaaaagttgggggtgggtgggcggtctcgctctgtcacctaggctggagtgcaatggcgcgatctcggctcactgcaacctccgcctcctgggttcaagtgattctcctgcctcagtctcctgagcagctgggactacaggtgccccctaccacgcccagctaatttttgtatttttggtagagatgggggttttgccatgttggccaggctggtctcaaactcctgagctcaagtgatccatttgcctcggcctcccaaagtgctggaattacaggtgtgagccaccgtgcccagcctggccttttttttttttaatacaataaaaagattaattgaaaattattaaatccatagcatagtttactgcagtttaccgtattgttcaatttaggtataattacagatacaggtgccctaataccacaaaactgtctggctagtgtgaactttggtccctaaagatctggtgaaatccctagccaggtgcagcagaggaatttgtctttgcctggattatcatctttggttcttactgtcctgtgttgcctctgtggcccatccattcctaggctgcaaggatggcttcaggccatttctgcttgtagagacttgcattctctctctggaattgctctaagcttagattttcagttgagcaaacactcatcacatgtacctgcagagagctcctgctgtctcttttctcagttgcataccaccccaggtaaggagggtccctctgcctccagtgtcactgcaaagcgacagctacctgttgcccattgcccaggctcacgtttggtcttttgtttggctgcctctcaggtagtggaaggtgaaacacaggacttttcctgatagagatagttattcctctgttgaaatccaatttaaatatcgttctcttcatggcaaaaaagagtcctagagttgctcaggccattctttggttcacagtccccaggatgcatgcaactgggatttttcttaaactacttacctcttttatttctatggtaactcccatgctaggaatacaaaacacaaatctgcacagcaatgttgcacactctctgttttattttccccaaattagccatgtttgagcgtggacctcttcatgggcagtgaggatcactcagcacacatttctgtaaactttttggtgcgcgtgggttttactgtcttctgttgaagctgtgtcccccatttggaaggacgtgcaggtgtgaaggaaggacagttcttgctgaaaaagatgggaatggcttgcagatgtctgtggattaagcagatctaaaagctatgagaaaactgcctacttgtgtgtgtgcgcgtatgtgtatagtaaatgtatatatgcatatattttatattgacattctgtagatatgtttgaatacagaaacttgtttttactccgactactgaatccagaagtaccaaataatatacagtaaacagtaaaaccaagatttaaggttgtgtcaaaaaggtacagtgattcagtcatatccatttgtcatttgttttagccttttttttttttttgagatggagtcttgctctgtcaccaggctggagtgcagtggcgcgatctcagctcactgcaacctctgcctcccgggctcaagcaattctcctgcctcagcctcctaagtagctgggacttacaggtgcatgtcaccacgcctggctaatttttgtatttttagtagagacggggtttcaccatattggccagggtggcctcgatctcctgacctcaagtgatcttccagccccagcctcctaaagtgcgggattataggcacgagccactgctcccagccggtttcagcgtttttctttgtttgtttgttttttaagagggagtctcactctgttgcccaggctggagtgcagtggcgcgatctcggctcactgcaagctccgccttctgtgttcacgccattctcctacctcagcctcctgtgtagctgggactacaggcgcccaccatcacgcccggctaatttttttttttttttgtatttttagtagagaaggggtttcaccgtgttagccagtatggtcttgatctcctgacctcgtgatcgcccacctcagcctcccaaagtgctgggattacaggcttgagccactgcacctggcctcagcattttttgagtgtttttctttctgcagttgatcagttggatcctccatatcttgcgtatatacatgggctcaattattatgttaggataatcaaataagaatactagttcaatgattagcactgagtggttgttaggcagtcatgtgctcaacactgatgtcacctctttctgtaagcatactgagtagagacattttttaggtttaaattgacttaaatgaaagtgaataaaaaggccttttcaaaagaatgggtttgaaaaacctcagtaccctttaatacatgtacatttctttcctttcttcatttaatataacatgtgtctgttgtaactgtgtttcttaaatgttattttaaggttatatgttctttaattatggtcaaatataatttggtcaccaaaaacgaaataatagtttaaaacaagtagctgttactaagggtgctaaaaatactcattttataattaatttttaaagttttcttagtatattataaattgtgccctggtcaagtacaaatgtacacatcaaaatgcccatattgtatctgtctttagtcacttgatgtgaattatatgtgaattttttttggttcaaagttttactaaccagaattaaacactccgcatgagaaaaacggcacaacacaatcttgaggtcccttctgaatcatcagattatattatgcttcatatgttaaagaaaaaagaaacctgcctactttattaaacttacaagtttaatagagtcttggagattgatgtcttggggcatgattgggaaagtctccaaggcataggtccatccatgtatttcttcatttattgacatcttgtgcccagcacttactgagccacagcaatgtgtagtaaacataatgcgtcctcagtcagtgtttgttgaaggggtaaacaaaccccattctgggttgtgttcttttttttttttttttttttttaaatatgagacggagtcttgctctgtcaccaggctggaatacagtggcgcaatctcggctcactgcagcctccgcctcctgagttcaagcgattcccctgcctcagcctcccaagtagctgggactgcagaagtatgccaccacgcccggctaattttgtatttttagtagagacggagtttcaccatgttggccaggatggtcttgatctcctgacctggtgatccacctgccttggcctcccaaagtgctaggatgacaggcgtgaaccaccacacctggccaggggacatgttcttaaagtttatgaagcatcagctttgtctaagctttagtcaagagtcagaactaatacagatggtcccaacttagcatggtttggcttaagatttttcaacttcatgacggtgtaaaagtgatagaaattcagtagaaattgtacttcaagtacctgtacgaccattctgtttttcatttttcagcacagcattcagtaaatacacaagatacttaacattttattatcaaataggctttgcatgagatgattttacccaactgtaggctcatgtaagtgttctgtggacggttaaggtaggctcggctacgatatggtgttaggtgtattaaatgcacgacaatactttcaatatatggtggtttttcgggatgtaacccattctaggttgaggagcatggagcatttgtagtcagagggaagaaaagacatttggaggattttgactggcgatttttatcattttgagaccagttttggactaagaagacagtcaaatcaatgttctcttttggcctgaagttttggaattcagtgatgtcgttgtcccctgcattcccctcctttgtggaatttcaaaacccccttcacataatgagagaaattaaccctgaagaaagaaaggactggaatttctactagcttgttgataatgcattattgttatgctgtcatgggaaacctgtcttcctaggttctaaattggtggatgactgtctggtgacggagtccaagcgtcattgcacaatgaagatgaaaaacgcatgttggatggctactccagtgaagttgaaaaatgcttgcctgataaaatgcttgcctgatggctactccagttgggcacatgcatactgccttctgcttttgctcaggaggaagataagtgaaactaaaggattttggttgagtaatttagagagagagtaaaaagattttggtgtttgtcatgggagttcacaggctcttctaatggaacagagaactgctttaggggccagtttcaggtttttgcctttctggaaggaaggggcagtcccttttccctttgaccacttacctctattgtcagtttgtgtaattatgtcagaactcagccacagcctctgttttttttttttttttttttatagctctatcaagtgattttcagctttatagggaaagatagctctgaaattttctttcttctttcttctcttctcttctcttctcttttctttctttttttgagacagagtcttactctattattcaggctggagtatagtggcaccatctcagctcactgcagcctccatctcccaggttcaagcaattctcctgcctcagcctcccaggtagctgggattacaggcacccgccaccaggcctggctaattttttttttttttttttcttttagtggagactgggtttcatcatgttggccaggcttgtctccaactcctggcctcaagtgatccacccgccttggcctcccaaagtgttgggattacaggtgtgaaccaccatgcctggccttgaaatttctttttctctactttttcctttttacccactgtttagtttgctagggctgctgtgacagagtaccacagactgggtagcttaaacagcagaagtttattttttcacaattctggtggctagatgtttaagatcaaggtgtcagcagggggttggttttgtctggagcttctctccttgcctcgtcgatgccatctcctccttgtatctttacgtggttttctctctgtccttgtttgtcataatctcttctcataaagatcccagtcctaccagattagggcccaccttaatgacctcatataaccctcttgcctttctaaaaggtcctatttccaaataaggtcacattctgagatactggggattgggactttaacatgagtgatttgaggggagactaacatgaatttttggggggtgaggttcagctcataacacccacttcactttttcgtagtacattggcagttctgtttcaagagctcagttaataattatttgatgtgtcatggattagaacatgaaacaggaattttgttttattcataaaactgtatccctagcacctagagcatagcgtaagccctcaataaatataggttggatattattggatgaatacatgtcatatctggaagaaggataaaggaatgccctgaagacatgttagtttcaaaatgttctaaaggcccagaagggcagtgaggattttcactggcttcagggctctgtgcaataatatagaaatagagaatctcacactgaagccagtcaacaggaccaacttcttttagccagtcctgtctttccagcagcatcatgcaatctaggacataagagagcccgtgtcaaaccatttttatataccgtgacactcttatttttaacacagtggttggattatttataagcaatcttggattcattcaataaccacaggtagatagtgctctcacctcattaaagcattattgcaggccgggcatggtggctcacacctgtaatcctagcgctttgggaggctgaggcaggtggatcgcctgaggtcaggagttcgagaccagcctggccaacatggtgaaaccccgtctctactaaaaatagaaaaattagctgagcatagtggcaggcacctgtaatcctagctactcgggaggctgaggcaggagaatcgcttgaaccagggaggtggaggttgcagtgagcccagatcacgccattgcactccagcctgggtgataaaagcgagaccttgtctcaaaaaaaaaaagtattattgcagagaaggaggtactcttagaactctggactctgttagcaaaagcgttggggattgatagtgatttaattttattcatgatgctgagagagtctcaccggaatgcagcgaggattttgcccctcatgtcatcaagctggtagtactttgttttatgcccggtttcttgtctgatgcaaccttttatgcaccatagtgaaaagttgtgcttaacatgtttatgatcccatatttggaaatcttgccttatttggattttgcaggtttgatagtttgataattcagagaggttggactcaaatttttatctataaacaagggatttactaacaatagtttggaatgatatgactaagaaagatgttcattacttacagatctctttagaagcatcatttacatacaataattacctgactcagaagaaagtcccctagggaagtcatctgacagtcctggtcactgtctgtgctttaaagctggctgttactgaagcctttaatgcatactgtttttcttcccaggtaatctgcaatagtaattatggtttagttgagtggcctcccccagttgagaaacacaatcataccatgcagtaaaaaatatttaaagcacacttatagttctagaactttgcatggataactctaattagtctgggagcgcttccctggagccgaatgtgtttaagaattcaatcttttaagtgccggtgatgtcagtttggagacagcagtatgtggctccattccaccgtgaatcctttgctagctgcagtgtactttagctaatagaatcaagtgcttgtcttcaagttttttaagagcataaaaaccctgtttattaaaacaattctctttggcactttgcagcattatgataatgctgtcttagcagaagtgtagagagctgtgaactcctagggggaggctctggaggaggaccattctttcccattgtatttcttcgggacaagcatcatttctttccttagtcaaaggctttgtctcagcttgcacttcacgttttgaatatctttctggagaaaagcaacagcaagtattctggatattacgcatgatgatggttttctttgatgcctatctaatataaactcccattctcctggaacctcacatattttaaaaaatattacttgaggctgggcccggtggctcacgcctgtaatcccagcactttgggaggccgaggctggtggatcacttgaggccaggagttcaagaccagcctgggcaacatgttgaaactctactaaaaataaaaaaatcagccaggcatgatggcggcatctgtaatcccagctacttgggaggctgaggcatgagaattgcttgaacccaggaggcagagattgcactgacctgagatggcaccactgcactatagccgaggcagcagagcacgaccctgtctcaaacacacacacacacacacacacacacacacatctttgaagtaagttactgatagggatggaagtcttccaaatctggaaaaatcaatgtatgaaagatccataaatattctgaatttgtcttaatgtgtctatgcacaatgtaaggaatgcattgataggtttctgtgctgttccccccacccccaccgccttttttttgtgacagagtcttgctgtgacacccaggctggaatgcagtggcatgatctgggctcattgcagcctcaaccacccgggctcaagcgattctcccgcctcagcctcccgagtagctgggactacagtcctgcaccaccgtgcctggctaatttttttttgtgtgtgtatttttttagtagagatggggttttactgtgttgcccaggctggtctcgaactcctgggctccagcgatccaccctccttggcctcccaatgtgttgggattacaggcatgatccaccgtgcccagcctgtatactgttgctatatagaagagtctagtaaagtctggctcatatttgaacattcaagaaatagtcgttggtcctgtcgctcccagaagctgcacaatttttgagtaaacgtagccaaagttttcagaatcactgaatgctgctagttcttttcttttcgtgattaattcagacaggccgcatccctgcgagacccttcttctcccacctccaccaacatccacagacctctccctccaaggctacaaccaccgagccctctgacagatttgatcgcactgctcaggcttactgtcctcactttgttctgtgtgtggtttggtatttttctgtcctgcccacccaggccaggccttccccacggtgctgtgatagagtattgttatttgttgcttattgtctggagaaaatctctcaattccatatcaaactgttgtttgaggccttttgttttcattgtcaaatgtgtcgggtggcagtctcatgaaaaaaatcacatttgaaggtatattcataatacctggtaggaagagaaaaataatggtgttcctgtgacctgtttacctgattctgaaactaaacagtgttgcatggaaagcgattttagcgatcttagaaaagaatgtgttgtgtcttttttttggaaacccagcgattcagttagcatattatttgtttgcgtgtatcttaccctttcaagaactctaaggtatgtgcgacatggtaaccccaatgcaaacggcattaaattgtggaagcaggaatggtgttaaaaggattcttagaggtggtgccggttaggaggaggaaggaagccgttgcatgccaggtatggtgtcaccacacatatttcgtcctggtagtgatcctgtgaattaccctccgtgaccatgctttgtggttgagcacagtgagtccctgtctgggcaagggatgatgtagcagcaaatggccgagctggctaggagtcacacccaggcctcctttgtctacgttggattactttttctgtgtctaccagcattagaaaatgagaaaagtgtcattatttgcaggaacatagggcatttcaggttaggaaggaagcaagagtgaaagtctaggatagaggtgaacatgaaccaggatattcggggaacgatgatcagacagtccagctggagtggggagtgctggtgtagggtggggaaggaaaggttggcaagaagtcacgcccttctgcccgactgaggaattggttttcatcatctataggaacttttgtaagtttttgaggagaaacactagtgagtgacaacttgggagtggtgtttgaccataaaggttaggcagcctgtgttgtgcaaagtgattatacaggagcaagatttcaggttgtgtcaatggtccagggaggcggagtaaacagacaggaagacaggaaggagtaagtgaaacgttaaaagatttgggtggttgcagaggggaggtggtttgaggaggaagattattgtagcaccatctgctggcaccagtactatctacaccagagccattcctcttcctgtgctgcaagaacccccgttttgttcaactgtccaacccttgcccttgtaacttgggtaaatcctgactgctttgagacagtcgtgggaatacccttcaagggtgggcatgtgattcctgttagtgagcaggtaacttctgagaaaggtttctttaccctaaaaagggacacaaagaagaggttgtttcagctgctgctggatgttgccatgcgtgcatgtatctcctggagcagtggcagccatcctgtgaccatgaggaaagctggcagaaggaaacaggaacttcgtaggtggttgagtggctaaattaattaaccctggggttttcctgcctcagacctttttgtaagattattaacctttattgtttaaggcaggggttggcaaactatggtccatgagacaccagccacttaaaaaaaaattttttttttaatttttaagagacgaggtcttgctctgtcttccaggagcatagtggtgcagtcttggctcactgcaacctccacctcccgggctcaagtgatcctcccacctcagcctcctaagtagctgggactacaggtgtgtgccaccatgtctggctaatttttgtatttctcgtagagacgaggttttgccatgttacccaggctggttttgaactcctaagctcaggcaatccacccgccttggcctcccaaagtgctgggatcataggcatgcaccaccatgcctggcctcacttgttttttgtaaataaagttttattggcatgcagcaatgtcatattgtctgtggctgcttttgcattgcagtggtggaattgagtagttatgaaagagagacagtatggttcacaaagccttaaatatttgctatctggtcttttagagaaaaagtttgttcacttctggtctaagccattttgagttaggttttctgtttatttgtagccaaagcctgtttaagatgctggccttgttttgtacctcttaactggagattgtcctgtaggcaagggctttctagagctgttgtgctgtcaggactgaagatgtgcatttgggattcactttcatatcacagaaagcagttaagaaagagtttctaagtatggggggatttataacatcaagtgcagatttgttgcaatttcaatgtggtggtgaaaagccaagatggcaggtgcttaaaaagggaatgagtgggaagatcaatttattggcataaattaaaagaaatgtttcagatatttcacctgagaacctaggatgcatcttgatggtcctagattatgaaagttaatgtttaatctgacttgctccaaacgaggacaaagttaggcaaaaatgcatcccatgtaacttgtttttgtggcctctgtgattcctcctcctgacctctgctgtgctggtactgagcaaagacttaaggtatatatgagaccctcatgtataatggtttgactgatagccccttacttgtatgatttttttctcatcgtaaatggtgcttttacacagtaattgcccgactcacgtgattcacttcgattccactctctgtggctgatgttgcatgaaggttgtaggcactgctgtgccagagtcaacagggataaagaaacctgatagattgatttgatggcagggatgtgtgattagagaaggtcgaatccataggcctttgcaggaagcagggattccagcaccgatatcgagctgtcttcaaaatactaatgaacaggtgagatgtcaaaggaagacagcatgaaccaaagatgatttatttgatcacttcagggggaataaaaccagttgaaatcacattagaattcaagggaaactgcacaagacatttcaagaaagttgaaaaagatagtccagaaaagttaagctgaaaaatttttctttctttttttttttttttgagatagaatctcgctctgtcacccaggctagagtgcagtggcacaatcttggctcactgcaaccttcacctcctgggtttaagcaattctcctgcttcagcctcccgagaagctgggactacagtcatgtatcaccatgcccagctaatttttatatttttggtagagatgggttttcactatgttgctcaggctggtctcgaactcctgacctcaagtgatccgcccactctggcctcccaaattgccgggattataggtgtgagccaccgcgcccagcctgaaaatcttgaaggagaaggctgctactccttgcctgctgcagatacttaattttgatgaaatagagagtaaaggatcattgaaggagtcactgtaaatttaaactcgtacttaagcatatactacctgaagacgtttaagagccattaatgtacatgaaagtattaggtaaagtttgagataaattgtcttatttttaaatgtagttggaagatctttgggggtgataaagaacaccttttttgtcagcaggagatttctttttgtggtagtttttcacgctcttccgccagatccaaacttcttgagagtgtggactgtgtctggttttgttcagctaaaatctgacatagtgcttggtatctagtagatgcttcataaatatgtgttaaataaatgtgctttactcctaattttataagacttgtgttaaggctgcttcagtagtcaagctccgcatagtagaaacatcttccaaaatgaagattgacaacttagctttaatatcgttgggtttcatgaacgtaatacatgtgtctgaatgcatacatggggttttactttcttttcatgatgggttttgatatatttaacgtttgaaattgatttttagaaacagaacctcagtctgtaccattacagctctgggaagtgagagttttctacttcactgtggtttgatttgtgattatcatttaataaccagttagtagtgaggggttgcatgtacattgcatggaatattagggctgggaagagatttagtgatagttgcatctagtccatttttttttccaaatgaggaaactgaggtaacttcctcacctaaggtccaactgctgattcttttcatagagggaagctaccgcctatctggttccttctctcctcactgccctatcctccctgcccccaatcctgcctgtacctccctgcaaaatttaggcaaaggtagagtccatcttcatgagagtatacattgggtaagagaattaatgtgacggataggaagaagttactataggaatgctgggagtggtggtttatgtagttctctgattgctttaagaccttttactgaagtgaaacctttattcttagcagatttgggttcatggatgtaagcatctgcttaggcttgtgaccagcatctctgtggtctgtgtgatagaatactgcttttctctgcacccttcaaggactcctgagctacacactctttatatgatagagaaaattatagatgtacttatctgttgggtggttctggatgaaagttccgttttctttgtctgcacagcccctgatgagctcttccctgctctgctgggaactggccctcatcctccttttccatcaaggttcctcttcaggctttgagcggatccatgcggagagagaacagtctcccgcctttccccatttcaagtccctggagcctctaggctctggggggcaacaccgaatacagggggcagagtgtggtgcccatccggcatcatcagcttttgcagcctcagcccccagctgactacagggacacctctgccatgcctcctttcccagggccatggctccggaagagccagtatctggagtcatggccctgggaccagaggcatgacagaggtctccctgtagtcaaaacctgtgcttgggttcgtggtaagccatctgaggcatctgctgtgttcctcccctattcttaaggggtggtctctctctctcagggttgaagcctaaatctggggcatgggtctgatgcaggtccttagggggccagccctgtggtgcactgagccacaaagaggttccagattgaaacccttacagatcttcctccattagtgcttgattttcattcatggtgcagagaacttgcaggacaaggttcatttgcccttctctaccattcctcctttgcctttgtccacatagatgaggagcaaggtggccttcaggagactttctggggcactaggaaatggccaagtgataggatgcagagttgaagacggctgttttaggccagggctcccagcactgtagcttgattactgctgattacttcagttcctccaaccaatcctttaccttccatgcagagaggaaaagtcccacttactgactggcagagggctttccaaggaaatcacaggccccaaggaaaagtggagtgttaatttgcttcatggggtgaaactgctttctgaaagcatggtttgggcctccagtttgtaataaaatcacagccagcccttattgttcacactggaaaatttattcttgtttgtgtaccactaatgactagctttcagaatgcttactttcttctcataattgtccactaatttactgtccttctgatgggaagaataacaatgtatttgaagttccttgggctactgggtttattgtttttgatacttttagatatttcaaacatggaccttttacgtgctttatgttgcgcaatattcatatttattagggctatttaatagcgatgcaaatgagttcagtgcagctgtgccggacaatagtcatggaaatgaattcatcttgttgcttttttcttttcttgggtcattctgatcttttcatacttttcttaatggaacaagcacgtttcttcaggaaaggtggcctcatgttttcatttgtctgcaggacaaataatttgagtttcatttcttcctgtggctcatgatccaaattggtcagaataaagttggttgcatcagaaatattgcagaagtttagtctctgctctccagaggttggctgagaaagcttcactctgggtagctgtcgcttcccctctgcgctccagcaaagtccatgctcatcagtgacacacatgcccttcccctccattgtattactcttaaattccttctgaaactaagaatttagcactaaatggaattgattcctgagttggacacattagtagttcaaccctggttgccagctctgtccctcttccgcacatcatttgcagcttttaatcttcactgaaagccaataattaagtatagcagaattatgtctgaagcaaggccaaattggcactgggtaaacctgaggacccgtcccatggaaaaccagtaataatttccccccgcatcctaattcttttttcatttcaaatcagcatttccaaagcactttcaagaccgttccctttttttatccttaggctgaaacatgccctgaaaggaaggggagaatgttttagtgactcatattcaagaaagagaacattgccaaaaatttgcaacaacaaggtaaatttattactcatgcaagtaagaagcagagctctcttcagtggcagctttcctcagcaaagctgggagccgatcttgtttaggatcttgggaagcgtgaagttcgaggctggtcaggctttgagaggtgggagtgagaggtcattagcagggtccttggatgagtgccttgttgatcagctgttgacaaaagcatggggatgtcagaagcccgtgtactggttctgagctgtcattgattcttaaactggtagtttcttgttaccatgactacagatcattcccccacctttacttcccccaagcacactcttcctccacatacgctttttgatgttttctcagacaaagcttcaggagagaccctcagggagaatcttccctgtggtgattaatcttcctccctgataatattttattttcagggggtctgattttcatttgcattaaatatgtgagaaaactacggcttagggaggtcatggggcttttctaagttcctgtatttggccagttggagaacctaggccttgtcacttcttgagatcttaagagtcttgatgccagggactgggccttattcttgtgagtttctttggtattttgcatgtagtaggtctgtagttgctgtttgttgattgaataagtgataccaccagtgcactgagcaggtcagattttgtttctaagtcagcacaggacccatcagtactgataaagccccaaaacccccacctttgcagtcagcctattgtgtatttggttggagcaaaagtaattgtggtttttgctatttttttaatgggaaaaactgcaattacttttgtaccaacctaagacctttcagtaagtgagagggcagcttgtgaagccaggctctttgtgaggtgtgagctactgaaggttaagtgtccaaaactagactctgatgtgtgcagttagccggggggaaggaggtagttcagaaaaccagaaggtggcagctagaattaataatccctgcctcctagtttggatataccctcactgcctttttttaaaagcaagaactctagagattaagtgttccaatagctgggatgcttttggaaggccgtgtatacctcagtgtatgtgttcccagtagtgtgtgccctggaggaaaccccagggcccagagcttccctgcagccccggccccagctctggccccggccctggccctggtcctggccctggaggcatcttctaatgaaattacctccactgaagtttcctataaacatagtcaagagcagcctctctccctgctgagctattgcagatccctcccacttcctcttctgctctcctttctctgaaacaccaagtgaggatgcgtgtttgcttgtttatggatggagtagctaaaggagcagggatggagcttgagttcctccagctcagaagttgatctgaggagtttttttcatttttgttttttatggagacagagtcttgctctgtcacccaggctggagtgcagtggtgttctctcagctcactgcaacctctgcctcccgggttcaagcaattctcaggccacagcctcccgagtagctgggactacaggcacccgtcaccacgccctgcccattttttatattttagtagagactgggtttcaccatgttgcccacgctggtctcgaactcctgagctcaaatcatccacccatcttggcctcccaaagtgttgggattataggtgtgagccactgcacccagtccacctgaggagtttctgaaacatctcactcaaacctccagcagtgaggcctgggcacctggttgttaactgagtttccctgaggaccctcagtcttcctcattagtaggccttgccctggtcaggcttcctcagtttgtggatggagcaggtagggcgcacggaggtgaatctcctgagccaggagcagcagagccaggatggaccctgacttctagcttccctcagcctgagctctttctctcctgccacactcttcttgggcctcttgctgtcaccctgggcttgtcaggtgccagcaggaactcttgggcaaatgggtcctatttctgcttgagtcttgaggtttggagcagcttaactgggagagaaggcagcatcctttaatgggggctggcagtttaatgccatcaaggggtaggatgggagtgtgaatggaagacagcccgtcttcattagactttacaatgtggcttatcaagtgcagtgtttgaagaccttgtgaagacatcatgagcctcacagtgctaagagggacctgaatgaaaggaaaacaatggctttcaatgatgatttgggaaacatggatgatgcactgatctgagcttatagatcctgtccttgggtgaacagggagaggtcagaaacaggaggatgcttaattcattccagccaccgctgctggagttgttttagcaaagctccccatttctgtagttggtgctggcattttgacgatttccccctttgctatggtgatctggaagcacagagccagatgtgtagctgcttctttgttcctaggcacacgccttttttccccgaatgtggccttggagtcagattgcccaggttcaaactttggttcctcggcttgttagctgcatggcctagacagcttgcttaacttctcttgcctgggttagaatgatagcaccccagcagtcctaataacaattcctgggctacagtatttactacctaccttgtggggttattatgaggaacaagtacaatcataacatcaagggctgagagccttcctagaacacagtaactatcccattaatgttcacagaactatcaccactcatgaaatcctagcttgaatatttacattagtcttgtttctcaaacttgactctttggtttgatcgacattttccctaatgctgattttcacctttatttctactttgctgtttgtattcttgggagtaacctttgatgtatgaatgaaataaataaattcaaatgccaggcttttaccatggggtctaatgtgcttgaaatcagaatgcaatagacgcttttgctaagcttgagggcaaagaggggctagtgctgcatccaggggtttcagcctggggactgcgtcctggccctctctgtccaatgccttcctgattctcccccacttaagttgctatcacagtaccttgctagaccaactaactagcacagtttgagacttttctttccttgctctgacttctttgtaagtgcagcttatgttgtcagaaagctcaaaatgttgtgacaataaggctgcagtcccgtgcagccggcgttttgtcgtgtgggtgtgatggtgcttgtgtgctgtgttcttattggcaatcgcgagacgcactcacggaatcacagatgccgcctacaaaaggtatctataaggtatctatgttccataaaagcaggtagcctgtttacttagccctggactaggcctctgggagggaggagggagaggtgggtgtgtgcaaatttggtggggagaaaaagtgttatataaaattgggaagatataaagcactgacaaaaagaaatgtgaaaagatgtgtttaaaacaatgcgcatgaagtgcgaagtctatggggcggttctgatgagcaagcatggaggactttttgggggaggggggtggtcttaagctgtgtcttaaagccaaaaaatgtgaagagaggtttccagatagagaggatgccatgagttaagtggatgcaggcatagcgctaagaataaaggagattgcgtgtttgacatgaccatcgtgaaggacccatgctctgttgaacctagtagtgaggttaggattggagaggccaagttacaggataaggaaagtagctttgtcatcatgggcaagaggaaaccactgcagcttctgagtggatccatggtgcaaatgggtggaaactggtgatggctggcaggggaaaaggggggtcccattttcaggcattatggagaaaagttaccaggatttgttcaataattggatggtaaagaaaaagagtgaagaaaaataattccaagtcttcagtgcttgagaatcaagaggttggatggcattgatgttgaatgaaaatcttgtgaaagctggagatgaatgacttagcagggggaagtcttagcactcttcaagagaggagaggcagtatgtccctgaagtttggattctggactctgcaatcatctgggtcaaaccccggttctaccagtcattagcttttgcaaccttgaccaaatgaacctctgtctgttttccccatttatgagggtgaaaatagcacctacctcagaaggtggtggcgaggattaagtgagagaacacacgtgaaatggttagaacagtgcctggcgtgtggtaagtacccactgaatgccagtgcttttattacggtgaatattcattgtattgaaagtcagacataggtgtggaaccagttatgggagtgaggataagtctagatttgggaatcagtcgcagagaggtggacgatgaaagtctgagaagaaaggatcttgctaatggagtgaactcagagcttgataaagggaggatgagtggaaatggagctcaacgctgtgccttgggaaatacctctgtggattggtgggagcacagtgagaaattcaagaaagacacagacaatggaataaccagagaattaggaggcaaatcgagagactgtgttgtcatgggaaccgaggaaggagaattttttttaaagatgtcgtataagtcagatacaatgagaattaagtgaaaattgaggctaacataatgtaccactgattaggcttgaatattattaaacatgctagagccgttcagctgtgggatgattgagaagccagagtttatgggatatgggaaccgtgatgggagattataggaaaaagatggagtggtgcttagaagaggcagcagagcaaacgaagccaggagttaagaatttaaaagctatacaaagagaactaatagagggcaagaaattagaaatacaaatgcaggcaggaatgcatgtgggagaccaggtagggagttggcagcatggggaacacagaggagaaaggccctgctgagcaggtggagaggaccttttttggcaaacaatggtgggcagatgtgtgcagtggtggagaaatctggatccaggggaaggcacaggctgagaacaggttttctccatcataataaatatctgcctgtgactggtataaatgtcgatgcttctcaaaccttaagaaacttccagcattttgttttgtttttcaaatgataagtttcttattcatactgcttctaagcattgggaaagaagtaactcagggagttttaaaaagcttttattttaaagaggtcttgtctcccaggaaacataacttttggaaacagtttacaaagaatttgctttttctcactgacagatagggtgtcttttggtgggagcagagccccagagccagaggacctgcctgcttgcttggcagtcccccgagcagacacaatttaggaacaggaaaccctagagaaacctgagtcaggatgctgtgggtcccagaagcaactgggtagttgtttcaagtttcctttttttttttgagcggggggtgggtggggcgggggcggcttcaaactggagattagcaaaaatgagttggatatttccttagacagttcaaaccctcataggtgaactcatctccgtctctgtttctgcttagttttctgcacatcctttctaagaactcacttatgtctataaataccttttaacaggttctcttcatatttggataccaggagtaaataagtgattttgcaagtatactcaaggattctggactaggtgctactgtgccctttatacagtctggtggggtttggggggtgggtgtgtgtggaaaagagaaactcccaaaccctcaaagaggatggggaacaatgtcctgaaagaacagggctcaggcagcagaagagctgaggggtctctgttctgaacgggtcccccttctccctgcccttcatcttgtgtgactgcggttgagaaagacctgcaggattaaaggatctggtgaccttgggaccccgcacttgcttggcagtgacagtcctgaggaactgtattctttcagttcctctatcagcaaagcagctcagtaggtaaagggcgaattccggcatttcagtgtctcttgccatgggtagctctcatatttccagttgatgatgtctggacacgtgcccttgtgaaatgagttgagtggtgtgagattgggagcccaaacctgtgaacacccaactgggctttttcctggccataaaaagctcgaataatggagagctttaggaaacaagttgtttgaaaactctgttgagttggctttgagcattcgtggaacattatttttaagaaccggttatttcatttaaaacagagtaaaaagagaagatgattgtattagtctgttctcatattgctgcaaagatactacctgagaccaggtactttataaaggaaagaggtttaattgattcatggttctgcatggctggggaggcctcaggaaactcacaatcatggtggaaggggaagcaaacatgtccttctttacagcgcagcaggaaggagaatgaacgagtgctcagtgaagggggaagccccttataaaaccatcagctcttgtgagaaactaactctcacgagaacaggatgggggatactgccccccatgattcaattatctctgcctagtccctcctacgacatgtggggattatgggaactacaattcaagatgaaatttgggtggggacacagccaaaccatatcagtgattgaggggagaacagggaatgaaacatcccctctcaacagtggtaggaataatggcctgtcatcattattgtcagcagtaactgacatttcttgaagacctcagtgcataaggcactgtactgagcgctttatattctgtgtcttgtttaatttcattcaaccctcccaacagcctgtactacattaaatactactgttacccacttttcttttctttcttttttttattgagacagagtcttgctttgttgtccaggctggagtgcagtggcacaatctcagctcactgcaacctccgcctcccaggttcaagtgactcttctgcctcagcctcccgagtagctgggactacaggtgtgcaccaccatacctggctaatttttgtattttttagtagagacagggtttcagcatattggccaggctggtctcgaactcctgaccttgtgatctgcctgccttgccctcccgaagtgctgggattacaggcatgagccatcgtgcccggccttttacccacattatacaggtgaaaaaaattatgttgctctaccatttccacaaatggcataggctggcctattactgtccttttccaaaatacgtgtctctcaaatagctctgcagctcttacagggctcctcgttgtcctctgtgctttacagtttgagatccttcacgttggaggtttgtagaggaccacagttgcaaaatagggtgcctggggtctctgcttatctgcattttgtcaaaggatactataggtcatggcgcatggtcttttgctgatgttcgttttggcaagaagcactatttttcatcatttgccaagaaaaccttttgtgcattttaccttaaggacctggatagcataagcagagaaagggaatcagcatttccatgttttgaaaagtaaaacaagactctttttggtctttgcgcccccatgccctagaaatcccataataagtgcaactgtctccttctgctgatggatttcctaagtcattcccagaaagaagttgggtgctttgtattgtattaatatattcatcctaaataagggtcttggggttttccccccttccaagatgtattaagaaggttgcttactgtaggctttgatttatttatttcctatgaaatgccagaaacaccaagtcctaaaatcctagatccaagtcattgacttctcagtgattatgaccacattgaattgattaaactcaagtgactgacaaggcgaataaaaatagcccaaaatgagtccagaccccatggttttaagagccccccaccagttccctaaagctacaggacggaaaggactcctgatcctttgtacctgaagagtgtggtgcctaacgtatagccaatgttcatttgtttcttctctctgtattttataaacataattactttgaatgaattgggttattcgggaagtcagcacatgtctccatctcctgctttctatttctagagtcctaagatagactttgctgacaagaagaggcccctgccccttcagagcttagagtgtagcagagagatgggtattcaggaaatcctcaaatagtgacagagccacagcggcagtgagtgacaggcaggagaactataggatgctggaagtgcatacaaccggggtgttacctagtctgggactggtggtcaagggggcttttttgaggcctggacaacccacagaccgagggtgggctagtgagagccagtgagggacactcttcaagatcccagcacttaaaagattggttgggcatgatgactcaggccgggaaccccagcactttgggaggctgagatgggaggattgcttgagcccaggagtttgagaccagccctggcaacaccgtaagaccccatctcaatgaaaagtaaattagtcagggccgggtatggtggctcatgcctgtaatcccagcattttgggaggctgaggcgggtggattgcctgagcttaggagtttgagatcagcctggcaacatggtgaaccctgtctctactaaaaatacaaaaaattagccgggcgtggtagcaggcacctgtaatcccagctactcaagaggctgaggcatgagaattccttggacccgggagacggatgttgcattgagcccagatcgcggcactgcactccagcctgggagacaaagcgaaactctgtctccaaaaaaaaaaaaaaaaaaaaaaaaaagtaaattagctaggcatgatggtacgtgcctgtggtgccaagctcctcaggaggctgaggcagaaggatggcctgaggccaggagttcgagattgcagtgagctgtgatcacacctctgcattccagcttggacgacagaacaacgccctgtttccaaaaaaaaaaaaagattggggtgctcttaagctcacagttctggccatctcctctttcctaagtggagggagatcgtggatccctgagggggaacctacttcccctttcacttcaaagtctgcttctgtttctaaaaatgaactgaaaccccatctgtttgctcatgtatttgaaaacccttgaaaatgtttatttttgtacatcttcatacgactctcgtctcagagctgcttctcctcttcaggtggtttctgggcacactggggacgtctgtgcacctcctctgagtggaagtcaatgcctgtgatcccctttctaaaggaggcacggatagctgctgtgcggttttttcaacctgtagccagttttcatgtttttgttctcaaaataatactttttttttcaggtgaagacaaggaacatttaatttacactgaaatgatttttcctcttagaccttctgaaagctatgacgtatgtatatttataccataatagatgctaatggtgtcctctctgggtgatggtcccagagatgtttataccacggcatttcactccactaataaatgtgggtggatggatggacgggcggacagatggaaatatcacacaggactgtgcccaggttccagacagtttggctttagggccccaactctgccaagggatattttttatatagcatcatgtttttcatcatgatgttagtctctctctcttttttttttctttgagatggagtctcgctctgttgccaggtgtgagtgcagtggcacgatcttaactgactgtgacctctgcctcctggattcaagcgattctcctgcctcagcctcccaagtagctggggctacaggtgcctgccatgcctggctgattttttttttttttagttgagacagggtttcatactggccaggctggtcttgaactcctgacctcaagtgatccacccacccaggcctcccaaagtgctgggattacaggcgtgagccactgcacctgcctgtaacatcatgatgttacagtcccccagctcctcacctggcctccctgtacccattcctggccccctccctccttcaatctcttttccacttcagagagtgatctttagcattcccagctccaccccacgctttctgcctgtaatcatttaaaggcttcccattgcttctaggatgaagtccaggatccttaaactggcctacaaggccctgtatcatcagctgccctgcgtctccagccgcctctcctcatcacccacactttttcttcatagcctccatcccagctgtaatgcagaattttgtttgataattatttaattcatgttcacctctcccattagactgcaagcttagcgaggccaggggctgttttgttgtttacccttgaaccccaacccatagcacatgtaagtactcatttgtcaggtgtttgtgtttcatatccattttttgccttttcttacatacatggacacacttttctctcttttgagataacttccagaattgagtggttatgagcaattcctggatccctgtttgcctcagagccggtaactgttctcaccttttgggaaccataaacgctgccattgttgacctgaacacgaggtgactctggcaggagccctggccatcgtcccttttttggttatcatctgacgtttgtgcagctacacacatcatatctcatttgatctcttggactcccgttggttagtagaaaccttattttatagacaaacagctgaagctcagaggtgttcagaaacttttgccccatttgctgcaagtggtccatgagggtctggaatcaagaccttctggttctggtttgatgctgggactgctctttctgaattgtttctatgcctgtctgttcaatgttataatgatgagggggccagtccctcaccagctgcattctaactggaggctagaaaataatgaatgggaagtaacttaggggaaaactatgatgaggttgttggcatttgttactcttggaaagaagtgtagccttggaaactagaggctaagaaataaagtgaggcttcttagatgtcgttgtgtattaaacaggaagcccgtttgctctggctgtagagtgtgcccatgagagtttatggaagaatgaacttgactcaataaataacccactcagtgcatgatacccttttcttcagctgcaggtaaatgtctgttatggtgagtgacatggtggcatgttgggctctatgaaactgagtccacacacagcctgctgtgctgcctgccctgaaacgggacaggcccttggtaaatgacttgctactgaatggtagtcctcacgatgacatgtgtggcccatttaatgagagaagtaaagaccgcagaggatggaggaaagggcagggggagaagttagctaatattaaattcctgaccacccacacctaatgaaaaagaatgttctctgcttgcagaggcagtgaattaggctggcaaggtaccaagggaggaggaaaagtgtgtgaatggatacccgctacatctgagcacagacttaacccagaaacgcaggcggtcaggaaatctaatgatggcttcggacctgggcagacttgagttgagacctgtgccctccgcctcacgagcctcagaaggctgttgagtctttttctgagtctcagtttctcattctgtaattgggggatgataaggataaaacctgacaagataattgtgactcaaatgccagttcctagtactggtgttagcacaaagctgagtaaatactcatggattcaaaggcgcgagatgtcataccatccaagttatcaggaatgtgtttgctgagggctccctgggtgctgacctggctctacaggttctgaataaagagttgaacagggtctagttcctgtagtcaaggcacttcagatagagagaaactggcttgccaccaactctcatggaatcccagatgtgtgtgctttcatagttcaacgttctggaatccagaggtgtcttacatgatggcctgtcatagtttaatgggccgccttttatttcttggaggtacatctatgatggctgggggtgtggattctcagagacctatcgtcagatagttccttggagcaattctcagagctaggctgcttaaggcatatgagggctcaggactcagagccctccttctttatgaccttccagggaacatcccttttcctggagtgtaaaatactgcatgttatcaggtttgcagtttccttgagttagggtgggggtgtcacaaggcttatctttgaggctgaggttcagtggatttggagaagtgtgttggcaatgaatttcggggagaatcttcccctcgttgtctgcctgtgtaagagttaattttagcagttgtgattgtgaattatttgtcaaaagatactcccacttctgaagcccttgtttgcacctggtggagacaataaagcttctaagagcaaaatataattttcttccctgcttgtttcttttcttagcattttagaaaatcccactcagtttctagagttaacacctttccccactaatcagaacacaacacacaacacacacacactctcacacatacagactccctcactgaccttatgggccctttgctctgctaaacacataggtactggatggagtttgtagcaacatgtccctgccccgaatttgtcatccagatgtcgcctttggatgtcatgtccttgacattgacccagggtgggacttctgcagtcaaatgctctacccctgagctatcccccctacggtgggacttctgaataaagcctgtgtcactgtctctctggttcccttcagcgggagctctctgtggtttaatggagtctccacttgaccaggagtgtttccagatgagaaacccagggagggctgcaagcaaatgagagtgaaaactgagctctgtcccactccaaatggcatccgggattcacataccaaggctggctgggaacagctgatccaggctgatcctgacactggagagtccaagcattggaggccagaggccattcagaagaattacctcggagtagaaggcttcctaatgagcaataaggaggaactcccccattcttagggcacaggcctaattgaaaccatcctgggaagagaacatctaattaagtctgactcctcagaggactcaaatagttatatatgaagaaatgctaatctcgtggccttacttgtggctagggaacctgaggtgatgctcaggacagcaataccagcccttacggccttgctgtgtgtcctgggctgtgaacagtgcagaagtccctgtctgttcccgtgattttgacagaggatgccagaggcagaagtgctgctctttggtggtgtccttggtggtgttttcatctgtctacattagggttgggttcactttttttttttttcttcttttttttcttgagacagggtctggctctggctcaggctctgtccaggctggagtgcagtggcatgatcttggctcactgcaacctctgcctcccaggctcaagccatcctcccacctcagccttccaggtagctgggactacaggtgcgtgccactacacctggctaatttttgtattttctgtagagacagggttttgccgtgttgcccaggctggtctcaaactcctgagctcaagtgatccgtgcacctcggcctccctaagtgctgggattacaggcttgattccagccaaagtgcctggctgactctttgaattagaagttaaggtgagttttagaactctggtcttttctgtgatttgaaatgttgcctctggggaaggtgctgttttctagttttatgaaatgatagactctcttcccaacacacacacacacacacactcacacattcacactcacactcccacctcttgagaagaccacaggagctgtggagacagttgtccttggtgtggccagcctggttgtgggacatgggccttaaggtgcagcacccccattcaccttctccaggatggaaacaattttcttcttcctcattggccttgctcaagaaatatgccaggcattttcaatgtcttctgtccagacccagaaggatactcagactacttctgtttaaatggggcttgtttttcataagcagttgcattgttgatgtggctaaatttagacagaaccccatctagattgtggtcaagggctatgaatgctgcctccactgagcaccaggtgggcttgtacattttggtgactcattgctgcttgtgatgagaggggcctgcacacttaaacccctccaaggcagcactgccctgttcagtcttacctatgactcaacgtcaggaagctgaggaccccggtagcctctagaactgaggtgtacccctgggctgcagtggaagaggatcttggggccctagtgatcccctagatctaaaaagcaaagagacagcttagaggaatagaggatttggtcagggtatgtgtgtgttggaggggtcagggcagttattttcttgcactgaattctgagcataaaaacttctagcttgctttgctttttgtcacccagcgatttctaaagacagtacacttgtgtgttcaaatcccttttcacacctggagaaattcactcttgactcccttccagtgtaagaagtagtttagcatagttccggaaacgcttcgatatcaagccatcaaaagacagactgcgaagtcactccgagtgtaagagctctctgtatgtagaggaccagctttctgagaatgttttggcagggacttgaaaatgtcagtcatgtgtagacagggaagtgtcataccattaagatgtatacgggatggtgacagagtgagagaggccttggggttttgaaagaagggagtgatttttgtagtcccaattcattgtcctctgagtagctcttccctcagcctcttgcatgcgactttggctggtcggggatgccaggcgagttctgagccggagactcatggggagtcctcttgtgcagctgacaccttctggagacaccttcctcactcccaaaggcacggggccttagtgctttctgagtagccaccttggaccatcggttcagtaatttgaatagtaaaatgtgggatggcgttttcttgctaaagtgcagcttaactgggggagtgagttgttaaaagagcagggtggtagcatagatgacaggcgttcataaagcactgaatttagagatctggacctggactgtgctgctgaatgtggaaacctagactcagtgtgaccatctctaagctcctttgagcttctaggagtctgtcatcaaaggtggtttccaacagcctccagggccccctggccctttgtgctccatccccacctccgctcattccagtttcacctggggctatgtggctacctcctcacgtctaggctctcctccttctgagatgctctttctctttcttgtttactggagggcttggctaagaccaaacttgggtaccctgggcagaactagggactcctgtgcctcctttccagagcatcgtgtgtggaccctttttgtcgtgtagttatttggttatttttctgcttctgtcgggcagtgggtatcgacaggtaagactgccttatttgccttggtatctaggagcactcaaaagtgaatagattgaatggaattaaatccttgaaattacagtagaaagcttaggttctttagaatagaatcgtggtgaaagatggcctttgtgttctgtgtattctgtgccctttttccgctaacaagttgatatcgtgctgttattttgttttgttgataacatagtgtggactttgtacttctaaaccttaggaaaacgtggatcattagtcatttttgtcacattgcagtctgccctaataaacatagtattggaaaaacgagatctgttaaagggaatgatgaattttgctgccttggagcttgttgatacctgaaaattggtttcggaaatcgagacgcctgatggaagtttgtgtgtcgttttggctgcgttaggctcttcttgagccctattaggctcgatgccattaaactgctatgcgtaatgagggtgacacgttgcagtgaactcccatcctccaaaggcttttaaactttagaaacctgtgtatatgctgtgcctaccctttatagtatatattaaaataaagtcacacaaaaatccaagtttagtgattaaaataacattagaagtgcataattcacgttataaggaaagtctctcctttcagaagaattcactgtggctttccctgactcttgacatatgatttgatttacaccaaaccaaaaaaaattcagcaacatcacacatccctttaagcaatcaatgaaaatgctcattcagttttacccctcaaaatgtgctttagataagtgagtctaatggtatcaaataatgcctctgtggacaggcataagtgagattctggcaaaaaaaaaaaaatctaaaagttttttaaacttattgaatctgtcagtcttgctcaacttttttttgtagtattcatagtattttgaagagagtaggtccagctttgaaaaactctaaacttaaaaaaaaaaaaaaaaaaaggtggccaggtgaggtggctcatgcctgtaatcctagcactttggaatgctgaggtgggaggattgcttgagcccacaatttccagatcagcctgggcaacatagtgagtccctgtctgtacaaaaaatgaattaaaaaaatagctgggtgtggtggcatgtgcctgtaggcctagctacttgggaggctgagctgggaggattgcttgagcccaggagatggaagtggtagtgagcagcgatagcaccactgcactccagcctgggcaacagcaagaccctatttcaaaaaaacaaaacaaaacaaaacaaaagcaaaaaaagcatgagctttaaagtgaatggataggtagagagattgaggaattttttggtaactccttagctatattgcctttaaaaaaaaaagtgtgtatattactttcagcaaaattatttcagcaaataagtataacactgctcttgtttatattctttcaattgaacctcgctgcccaaccagtagtacatcctcagccttttttcctctccccagatagctcatcttcacgatccctagcacagcactaaatgcaaacaaaatgtccttacatgtgagtcaagtacagtttagtctggagaaaaggcccctgtgtctgaagctgttccttctatgagccaaacatcaagtgttcaagtcagagggactacacagaccaggacagggggctggcttccagggctgaggttgttgctgtaattgtttttgggtgtgcacctgcagcgcctgtgtaaaggtggagacagtggtgggaggagtgaaatctcccaccgtggttggatgctggacgaacggcctcaggtgtaggcagcttttttgttgttgtttttttgtttgttttgttttgttctgccatgcgcttcagtttggaagcagcctatattgtacacgttgattactttgaagaagtgatttcttattttgcttcatgttcattttcaaggaggtataccttggggagtgggagtgttttttgtttttgttttttttttaagcattgtttatagccacaatagaatgtcattggaaagagtggaggctttggaattacatttttatcccatactaactgggtgacctttgacaagatcgttaactcatactgagtggagttcctgtttcatgctgggaatcatgctgggacctcaaagacctcctgttctggagagagagatgctcatcgggggccagcagagccaagttcacaggacagagcagggatgccccagccagtctgcaagaattggaacagcttggtggaagagagacacagtccctcttagtcacagtctccttgtctggaagtaggggcaatggtaccgcagaggggtggtactgagtgctaagtaaaacgagttagaaatgcctttcacagagtctgatgaatgaacgtgggtccccatctttggtacctgaagacggccatgtcccacaggtgtgtggtcagagggtgcacagttcacagaaggcctccacagtgaggtgggatgcaggtggaaagagaagtcccaggaaaagggaggcaggggaggaaacagaaagctgcggttggaagaagacctcagcacaggtgcactttttctcttgtggattagttattaccggatgactttcatccacacacttaacactctctttgcagggacagttttggggaagggtaggcgtctgctttcacagaaggtaattaccgcaaaagctggtaccagctcatgctgttctgatgttttggttacgcaatcatgggcccctgtactagtacatttgtcttcataagctgtgctgaattattttttaaaaccgctaactgatgcgattagtaaaacattttggtttttaacttttgatgaaaatagcactgtttggaactgtgatgcaggggtttactgctgagtgaagttctagaattttgctgaaagtaacatgacctgctctgtgggtctcactctgtctctctgttaagattgttgagtgaatggaagaaaaggaagacttggtgtgtttccagtgatctataaagaaatgatgaagtgaatatgttctgtggatctctgttctctctttgactctattaaccaagtaatatcttaatttaaaatgatgaaatttaggaaattagacattgctattcatcttagaagggaacaaagtatccatgctggtctagtgaagccacatattaaatcctcttaaaacttaaactgtgccttttttccagatttgatctacgtgtggatattctaatgattgaatataataggattccattctttaatttcaaaacttttagaatacggagttagaatttatttatttatttatttatttatttatttatttatttattacctaaaacaagttcagtggaagatgctttttgattattatcacattttgggcttttgtttttggtaacatgcaggccatatatgaatgaaattttgctctttcacagaatgatatgagcatctgtttcttctaattagaatacatctacaggagaagagggattttaattttcatgttgtagcgaatgtctaagggttgaccgggtattttggaggagtagttgtactttgatcatatttgtatttgcttttctggtcaggagcctggataaggaagcgccccctaacgggtgggtggagcagagggagtggggcgagagatggagaggaggggccggggcaaggaaggatccctaggtctgccttcctgtccacagcactgcccgccagccacagctcctgagtcaaaggctctgaagcaaagttgtatgatgaaccttggatttcctgtacaatttggctaactctagggtgatctctaataaagacaaaggccaggggacagaaatatctttcttttgctcctggcaaatcccattttgattctatctcaatctaactgtccagaaaattggattgaaagcaggacaccgccgggaggtaaatcagattagggcttcctctaccacagcctccagcagacatttcattttgcagtgtgcgtccctcatttatatgaagccgtgtatggcccctccatgcagcagggtgcgtccaagctgacccagcgaaccaagacatcaggtgaccctccaatttgattcactgaaaatactgccggtggcttcattttctccagagaactgtctgcacctctgttcctttctttttatttgggtgcctatgatgacctcattgaagtcttcatctttttcttagccaatgtagcgtttgctaaggagccagacctcagataggaatggagagccccagaatccaggtgcagcacaggtgcttccagaaccttctatgtggtcccttcgggaaaggatcatctgtttttgtgaggcttaacaggaagacagaactagggaagaagcagggtgaggagggagaagtgcagctgtgtatagcgagaataaggatctgccgaaatttatcttggggtttttatttcctcttgaaatgttgtgcgttctgagaacctcgaggagtgtttttgttgcctgataggaactggcccggcttgttcctattgcactgaagccttcaggaatgcggcctctgcacctgtgatgaaaacaacatccaagaaacccaccagtgggttccagaacttcctttctacagtgactgtttgggtcacaaaacataactagacaaaaaattagctgggcgtggtggcgggtgcctgtagtcccagctactcaggaggctgaggcaggagaatggcatgaacctgggaggcggagcatgcagtgagccgagatggcaccactgcactccagcctggatgacagagcgagactccgtctcaaaaacaaacaaacaaaaaaacaaacaaaacacataactagaaattatgaggtttataagggctggtgtcttaaccgcaagtgcctgtttgaacccccattgagcttgtagcatcgagatgtgctgtgtgtcacattcagccacatttgtacagttggtggcatttaggagtcctgcctggaaggccaagaatatttttccccacagtggcttaggaaatggaactggagccctcattcccctcacttcccactggctaggtggtcacggatgtggaaatatcccaagcttgaaaccactgaagatggagctcctgacttggaacagaggctctggggtaaggcaggcattggggacttgagggaatcccaggaaaagactgggaactagaacccatgtgccctcgtacagatccacagtccccttgccttgggtcccgtgatcctttttttctttttttttttctttttttgagatagagtcttgctttgtcacccagactggagcgcagtggcttgatctcagctcactgcaacctccacctcctgggttcaagcgattctcctgcctcagcctcctaagtagctgagattacaggcgcccgccaccatgcccagctaattttttgtgttttcagtagaaacgtgtttcgccatgttgaccaggctggtctcgaactcctgacctcaggtgatccgcccacctcagcctcccaaagtgctgggattatagacgtgagccactgcgcccagcccccctgatctttagaactgccctgcttgcctccctttgcgccgccctcgtctgctgtaggtcgaattggtttaagagctgggcatccactggggagaaaaatcagagtagggcttcctgggactcttctgggttgttctgactaacattgggttttactcaaattttctctccctgatgtaaacacgcagatattttttaaggttttaagtgtgaccatttagcttacatgcaagtcagaatactttgggttttttcagatccaatagcaggagcatccaggcttttaaagctgtgggatatgatttctgtgtatttgggctaaattaatttgtttattgataacctcagttgttatcatgctaaactgtcagaattggatgtgaagccagtgcttatgtagactttatttatgtctggcttctttctgaaaacaattcctcctcatgccctagtttcatgttgtgattttagcagaattaatctgaaatgactcaaaattatacaattaattgcattcagcttcaattacagtctgctggatgaaccaagcccactgccctctctgggcagtcacttgcatgtggcagctttgtaggtgctaaggccctgtggactccctggtcagtgtgctggcttcctggggaaagcattttggggttgacagtcccaggggcctaatgcctcagttgcagacaaatgcaggctggacctggggctgcaaaaatgccaggtaacagcaaagaccatggaggtgagtgtcatggaatttgggataaatgataaaacattcttttcttttttagtagaaaacccagatttgggtgtttagggttggagaaggcaggatctgggtaggtgtattagtctgttttcatgctactgataaagacatacccgaaactgggcaatttacaaaagaaagaggtttaatggactcacagttccatgtgtctggggaggcctcacaatcatggcggaaggtgaaaggcacatccacatggcagcagacaagagtaagagccaagcgaaacaagtttccctttctaaaaccatcagatctcatgagacttcttcactactacgagaacagtccaccatgattcaattaataactcccactggctccctcccccaatgtgtaggaatttacgggaggtacaattcgagatgagatttgggtggagacacagctaaaccgtatcagtaggtttaaggtttggaaggtggccagccccagggcagagaagcttctactggagattccttcctttctcctttttactctgtgcaattgtgggccctggggtgagccaggtgagggcaggtgcctgaccacaggatggaagggccggcagatggcggacccaggcagcagtggagggaaggtgggggttgaggggatgcagagggctgagagaaactggggatggagggaactgtggtcgacgcagctataggtctggacttatttttcccagatgaggaatatctttaagtccacataagtgagtcagggactgcttgtattcaacttgtgctcctttgaaatgttcttattctccccacgaactgactttcattcacaccgtctatttggcaatacatgaccgaatttggagcctagttctttttggcaagaaaagttcattaattttagtcggctccccacacacttcacaaatgtgcttgaaaaaataaagggcctcttatcgccacacagctgccacgaaattgccaggagtgctgagtgctcacatatagaagacggccatttatgttgatgctgtgagaagaaaaggtcccccgaagcactttgaactggagctgccaggaaaatgatggtaaatgcagaagcatcagcgaagccataggctttatgatcatttatcattccaaatttctaaggattatcttcatctcttttattctgtaaacactgattaacttttaaaggtgatggaagtctggctgagtcaaacttactcatccatcaacttagtggacttggagaaaaggccctgctgtgacattttgattaactgggatcttacctgtgtggggttttctttccacttaatatctaagaacacaagggtgggaagaaacttcagtgcctgcctgccttctgctcttttcctcatctgtaaatgaacatctgagaagggagtgagacgttcatatcagcctgtgcagtaggcctagctacactcatttatttgctctctcttttctgatttctctctgtactgggctgaacaatgttccctcaaaattcatgctcgtccagaacctcacaatgtcaccttatttgcaaatagggtctctgcagatgtaaatagttaaggtggtggtagattagggtagacactaaatccattgactgttgttctcgtaagaaggccaggtgaagacacagagacacacaggaggaaggccacgagatactggaggcagagattggaacgatgcatctacaaaccgaggaatgccaagatttgccaggagccaccaggaactaggagtgaaagatgaggaacagattctttctcagagcttccagaaggaaccagccccatcaatgccttgattccagacttttgtcctccagtagcaattctgagaatagattcctgttctgagttacccagcttgtggtactttgctggggcaaccctaggaaatgaataaactcattgtacttctgaggtgtctttgttctctttttaataccaggtatatactgctgctcattctaaatttcctcttgtccaacccaagtttaagagccgtaagtggcctattctaagttttcttcccatccaaggctctataagaggccattgccccaaaccaagggtttggaatagtcaaagatcctgcccagatgtgatgcccaggtgttctcagccgtgggtttggggatgatagatctctaaaactctcgaacatctagactttaaaattgtcatcccctgtgctggcttccaaccacaggttctgtgctgcttccagctcccttctctgctgttggagattatttggggactgactgcgaggcaagtgaatgaaatagatggcagaaaagacaaaggccaaaaaatccgctgcacctactggcttcccagatggtgtccaagggatgaaatagcttgagccctgggccacaccatatttctgtcctgactgtagctgttttgctaaggagcccgtactagccttggaggaacagctttcgatgctgcaaggaaagcacagagtggggatagctgatgggagttgtttcagtggtttaggctgacttggtgattctaggtatgccttaggccagtggctgctgcttcttctgtacatgaatgtcatgaatgtctgagtagggagtgagaggttcatgtaaaccttttatgttgtaggcccagctgtgtggccatgggagggtgcttggcatgattaggatggaaaacttttttgcctacactgatcatgccagagcgatttaatatttcaataagaatttaagggatagactcatcttggagtcgtcgtcttggcctgttttctcaccagtgttttgggtgtttgtccaagagaacttaagagttcttaactgagtattttgggcctgtgggggtcaggagaacagcatgttttacctctactgaaggtaggagctaccttggcatttggggtgaagagatgtgtggggtttcttagtgtaggggatggtcgtggagcctgggagacctagatggctcagttcttctaatttgttgagccttggtgcatccctctcttggggtgatgataatggtgccacctcagagggctgttgaagatgtgagatgcatatagaacacagcatctggctcgctgtgagctctctggagaggttagccattgagatggtttggctgtgtccccacccaaatctcatcttgaactgtagttcccataatccccatgtggaagggacctggtgggaggtagttgaatcatgggggtagttacctccatgctgttctcgtgatagtgagttctcatgagatttgatggttctataaggggcctttcccaccctttgctctgcacttctccttgctgccagcatgtgaagaaggacatgtttgcttctccttccatcatgattgtaagtttcctgaggcctcctcagccctgcggaactgtgagtcaattaaacctcttcttttataaatgacccagtcttaggtatgtcttttttagcagcatgagaacggactactacagccatgatcactagctgagtgtgctgctggggtcacctgctgtactcctgcagacctcaatctttacagagtagaaaaatgaagcctgatatcctcatgggctctttttgtatatcagaatctccgtcatctcccacccaccaaattggtttggagcaagcaacctgacataaggagtatgaccttcacaaagtcatgttgtgtaagtagcagtttcccaaactaggcagtgtaagtgagagctctaaaccacttagtggatgagggtatactgattttaatttttaaaagttgagttattattggaacatgaaagaaagcctatttcgcagaatcagccagtgaggcattccttcttttgtcaggatcttgtagttgctatgtcaattaatctgctttctatttaggccattgaaataaagttatatctaaaaccttgaagtaaggtacaaaaagtctacagcttcctggaacacagcctagacgctggagttaaacaaaaatggacacaggggtcttaagaccccccagtagaatatgcaacactgctagggtgccttgaagatcctttcaggtttgtcttcttttttatctctttattttcctttttttttttgagacggggtttctattctgtcgcccaggctggagtgtagtggtgcactctcagctcactacaacctccacttcctgggctcaagcaatcctcttgcttcagcctcccaagtagctgagactacaggcatgcaccaccacgcccagctaatttttgtatttttagtagaggtggggtttcaccatgttggccaggttggtctcaaactcctgagctcaggtggtccgcccacctcagcctcctaaactgctgggattacaggcgtgagccaccgtgccctgcccctttcagaatcttctgagaattgtcttactgtaatattccttacacatttggttaccgaccttcccagtacgtcattggagaaagcaaaggcaaaagggggaaggagagaagtaacatttgttaaatgctaactgtgtgccaaccacttgacatggtgcatgttatccccattttacagatgggaacgtagaggctgagggaggtaaagtaacttgattaagtttaccctgctatgaagtaatggagttgggatttgaaccactaaggaacacactcaggtattgttaagtaaaaaaaaaagggataatgattgagcacactggcttacgcctgtaatcctaacactttgggagattgaggtgggtggattgcttcagcccaggagttcaagtccagcctgggccatctggcaaatccctgtctcaaaaaaaaaaaaaaaaatacaaaaattagctggaggtggtggtacacacctgtagtcccagctactcaggaggctgaggcaggaggatcaattgagcctgggaagttgaggctgcacggagccatgatcatgttattgcactccagcctggatgacggaactacgataacaacaacaaaacaaaacacatgatgaatacgcactgaaagatcaaattagattctctacctccgttgaagaaggtaaaaaagtatatagtagaatccctcagaaatatgaatggttagaattatttttaaagttttgtaaatgtggggcaaatttctattttctggaaaattcttctggtggaacaccttgctctctaaaagtgccagataaatgagattccgcttgatttgagagctaagttctatgtccagttcttccttgctgttattaagcagcaaagagagacccatggttgcacactgggaggcttttctctttatcgttactgtgtttatagacccgactccatcgggggtgcttttaagtaagtaattattttggggcattgttgctctttttcgttcagtgcgtaagtatcactctctactgctttctgatctttttacttttatttttatttttattttttagtacttccaagtgagaagggatgtggcctcccagctggtgtttgtcagggttacatggtacatgtgcaggaagggccacatcagcaggccttgagtaatccatccgcagtctcgaaggatgaatcattcatgaaagcagttttccatcccgctcactggatgcaagcctttcttgcaaagttgatttcttttgcaaaattaacctttgctttctgctccttgcccacacagcttttgaaataggaagcccacagagttgtgttgtttttttctaagtaagtctaacggactgggcatttgtaacttcaattattacgcaaggtattgaattccgcctatgaaatctatgaaggtcattgcccgtggacttagaagtgcctagcagagttgaatggtatgtgggctgtgtgtgtatgatccatatggctgaagtcgtggttcttactattactatatgattatgtatattttaaaaatagctccttcagattttaactagttttaaaactcaaagtatgtgaaagggtttgcatttgatagaggggggaaaaggcatacttaatatccagggttgataagcgaaggcgtgccacctcctgtaagtccacccctttcatcctttacccccatttctcacactacttttttggtgttttgtgcgtttttattttttccgaattgcagcagtgcagacagggagaagaactaaaatcactctatagctggcctctgctgctcattacgttttagtgggataaaaccttgtcttgccctcctagttggagaaccagctgaattgcacctttgaatgttgctgggttttgtgccaacctgccagctgatggggcagaccagcagcttagtgtctcctttgctgtggaagcagaactgcgtccccattatttgacaggcaggaaacggtaaggctagcaaagcggggactgaagacttcaggtgtcccagctcctaccccagaggttggtcgcagacacaggtttataaaacatcagtatgtggagccaccttctctgaggttgtcttgttgtgtctgtttcttccttagaaaagcacatcccagatgggcatgatggctcacgcctgtaatcccagcactttgggaggttgaggcgggtggatcatttgagcccaggagttggagaccagcctgggcgacaaggcaaaaccccatctctacaaaaaatacaaagattagccgggtgtgatagtacacgcctgtagttccagctactcaggggaatgaggcaggagaattgcttgagcccaggaattcgaggctgcggtacgctatgttcacgtcactgcactccaggctgggtgaaaaaatgagaccccatctcaaaaaaaaaaaaaaaaaagaaaagaaaatcacatcccaatcctaatacttttaaaagttcatgtgccaaatttaatattcaagttgctaacatgttatctgtatgtaaaaaaacctgttcttctaaccagacttcttccagacttgttttgatcagtctcaaccagcatatgtcattggcacatttaagcacaggtatgtaatttttagcaatagtgagatgttctatagtggagtgcccgtgtcacctgagttgtggtgaacagtttcaaatatccttcattttccagtattcaaaaatgaggaaatgacctcagatttcagtgctatgataattcccctagttatctcctaattctgtgcttattttgtgttgcagcaagtgaagctcagagagctcgcgtgctaggtaggcactaagtggtaaaaatgatgtaacattttctggggaaatgtatccaaagatcaatttgtaatagaaaaacagtattcactgggcacttaggtttatattatgatagcagatacttgagaaccttcttggcatagaggcattctgtgggtttcatggtggcccatgagttaattggcagctggagtgtgaagtaattgaaataattgacccctgagataatgggtgtataggcactggggttcctaactatcgaggaggagactggggttcctaactaccgaggaggagactggggttcctaactaccgaggaggagactggggttcctaactaccgagcatgcttctatgggatgtcattgaggtgtttcctgtttccgtgaacagtgtctagttttttcttttttgaccctctattttcatcacttctaagatgagaccttggttgtgggcagagggtgtgtgatatattcttttaaacgtcgggtctgcttccctctgtttgaactcaagttggacagacaaatcccttcatggatggaagctggctggtgctctgcggtttctgagatcagtgcacaaggccaaacccagtttgtcaataacagcttcttcctcattgttttatgtttctaatgaaacagctcctattttgtagtacacaaaggggaaatgtgaggctggaaagcaacataggattcttcattccagacagcagccagtgggcccgctcatgaaaagttgatggttgtgcttaatgagagaagaaaaaaggcatctaatagctaaagtttgccttaacataataattacttcccatgtagcagttccatttttctaatacttgaatgtcttattgtataagaaagcaaggtacttatttatttttacaaccttacatctagtttctgtgaacgttttcattgtataaatttgtttctttctcaaaatagataaaagacaccaaccatcttttttaatctactgaagcacatgaatagtgcttatgtccattttaggatacttttttgtaagccatgatataggtcttccccaccaatggtggcagcttctttagaggcaatttacaaaaacacgaacacccctacctcccacctatggtttttgctttctataaaaatgttgaatatgtcatagctaagaggaatgaaatgtcctcctgcagagaataagaatctcttattaaaagtagcccagaagtttactgttggtgcttagaaaataattgaaggatgtggaagaagaattacaaagacatgcacacacatgcacgtgcacacatgcaaacacacacacacacacacacacacacacacacacacacacatttatgagtcactgactggcaatcataataaattatttccccagaatcaattgtaagcctgcagactccagagaggttggcttacccggcctggagcagtgctgggtggagttgtttactctcctgtggcagccttagggctcttgaggtatatgtgcgctcttagtcctctgttatcttctgtcaccgggagacaggcaacatgtgcaccagaaactgctgccatgcctgtcgccctgtataatgtgcagtttttgctgacttttctctgaaaccgtaagaaaagatctagtgactagctgagtcacttgaactatgtgagttaagtcacttgaactacacgagttaactgagcaaacttgcagctacccaggaatttgattttgtatggtgaaattcttagccttgattctgtgtttttttttttttaaatttttttatttttttgagacgaagttttgctctgtcgcccaagctggagtgcagtggcatgatctcggctcactgcaacctccgcctcccaagctcaagcgattctcctgcctcagcctcccaagtagctgagattacaggcatgtgccaccatgcccagctaattttttgtatttttagtagagatggggtttcaccatgttagccaggttggtctcgatctcctgacctcatgatctgcctgccttggcctcccaaagtgctgggattgcaggcatgagccactgtgcccagctagtttgtttgttttgtttttttaatttattttttagagcagttttaggttcccagcaaaactgagcagaagatacagagatttcccatgtacctcatttctctgtgcctgcacagcatccccactgtcatcatccctcaccagagtggtccattcattgcagttgattaagctgcattgacattattatcacccaaagtccacagtttatggaagagttcattcttggtgtatcttctgtgagttgtgacaaatgtatcatcatatacagctactattctagtatcatgcaaggtatattttcactgccctaaagatcttctatgctccaccaatagaagatccctttttcttccaacccttagcatccattgatccttctattgtctccatggttttgcctttttcaggatgtcatgtatttggaatcctgcagcatgtaaccttttcagattggcttcttacacttagcaatatgcatttatgttttttctatgtcttttcgtggctggatggctcatttctgtttagtgctaaataagattctatcatctggatgcaccgcagtttatccattcacctactgaagggcgtctgggttgctttcaagtttggggcaattatgaagaaggctgccataaacatccgtgtgcaggttttcatacattttaaactcatttgggtaaatatatgacccactgcaattgtggggtaaaatggaaagaatatgtttagttttttaagaaactgccaaactgtcttccaaagtggctgtaccattttgcttgccctccagcaatgaatgagagatctcattggtccacatccttgtcagcgtttggtgttgtcagtgttttggattttggccattctaataggtgtgtagtggtatctcattgctttaatttgcagatccctaatgacatattatattgagcatcttttcacatgcatatttgccatctgtacatcttctttggtgagatatctggtcttgtgcccatttttaattgggctgtttgttttcctattgctgaattttaagagttatttgtatattttgtataatacttctttatcagatttattttttgcaatattttctcccagcctataatatcttctgattcttttgacagtgtcttttgcagagcagaagtttttaattataatgaaatccagcttaccaattattttttcatggattgctcctttggcctttggtattgtatctaaaacgttattgccaaacccaaggtcatctagatctttctcctttgttattttgtagagttttacaattttgtgttttggtttttttaattaaatacaaagggattggtggtttttgtttcttggtagaaacatagtttgtttctttaccagtgacataagcaataacttaagtaaataaatgaatgactaggaaactctttgactaggccaacccccatagccttaataaccacaacttaacatttgcagaataggaaggactaatcctttaatttatcttttatgtctatccagaactttagtcctatgagctgttttgtaaacgagatttgttttgtgggaaagggaattttgtttcaagacttccctaagaaactgatagcatcgggtaattcttaaatttgacttatcataatggtatatctggaaggaatttgtcaactgatatgttataattattttttaattttttttaatttttgagataggtcttactctcttgcccagactggagtgcagtggtgtgatcatggttcacagcagcctcaaactcctgggctcaagagatcctcccacctcagtctcctgagtagctgggactaaaggcatgtgccaccatgcctggctagttaatttttttttttttttaagtagagatgaagtcttgctgtgttgtccaagctggtctcacactcctgagcttgagcagtcctcccaccttggcccctcaaaagtgttgagattacagaggggagccactgtgcctggcctgatatgttttaattctaacagtagatctgcatagagagaaaagttggtattatgaacaaaggtagctttaattcgaagagacaaccatccccattccacaacctctttccacccaagcaaggaaatttattgaggccagtaacattttaaatgctttttggagttgtttatttgcatgtactttctttcttattgtgtaagatttgacttttttttttaaaggagtttcttcacatggataactcagtttgtatagcctaatgtaatctcagcaataagtcaaaagctgttcttctgtagggctatatagttctctgacataggaaatcattcttagttccattatattgagaagaaacagagaagcattttacatccaagtgcaccagcagctgttttgttacatagctgctgtgtgcagagcccaatactgagaattttaagaagtcactgaaatatgtcgaagcacgaggatgggtctggatctcctcactctagacgcctgtaccttttttctgtagtcggtgaatgaaattttggaacatgaactgcacgtgtggaaagaatttgtgtgtgggtggaggaagcatctaatgggaactgagctgggggaagtagagcttggtcccaggtgtcccagctggaagagtttgaagccagacccagggagccctgcgtttgaggccacctgcactgctcacaagccacgggccttgggaagccctttctgggaacttgcttgtggagctgagatgggggtcagaattattctgcaaagtggttcccactgagcaacaagtgactttctcttcctccacgttttcttctccttacctcaaaatggaagaaacttcttggcaaaataccatttaacataatttggccacactgaacatttaaaaataatcaaagatggagtctgtgctgttaagaattgataagtattccacataaaatctaaacatcgttcttttctttattaaatttttggtgtaatgcacaaaaacttgaaacttcagcttttaataaaattgactttatttctaaagagaagtgggaataacagtggtgctaagattagcagtaaaagcctttaacctgcgaattccttcacgctggggtcaaagaagggaagtccacgtggatgtttgacttgtgacctcttccttcatttaaaaaaaaaaaagacttaaattactcatgccctcagtttaaatttgtgactggcatttgaaactatggaatgattcacttttccttgtagcaagaaaatttgaaaatgaaagcaaaatgatgctcatattcaaactgaacctactatgaaaagatgtttgctgatggcttcgttgccctgcaaacacacacgacagagatggctgttgttcaacacattattttcctcttcctctgagcatcttagagagggatgactgtgcatgttgcctcatgcgcaggaggtggtgtgcaaagatcttttggtttgtatcgtggcttacaggctctcatttaggccatggcatggtacattccaataccatgagtggttaaatctcaggaattccaaagtgtatgaacggagtgatgtcagctgtactctcatttcatgctatgtagccagatgtcgtgtagctaacctcagcagttactatacataatgtgctataactggctgatttaaggtaaactgcctcagtttcctcatctgtaaatgatggcttttgactaaataatagcttagttttcattgtgaacaaaatgcttgtttagctgggcaaacacatttttttttgcagaaaaacagccctatcaccaatagtacctgctctagtgcttttaaaaattagaatgaaattttgtttgtacatttttgtttgtttttgacagtctcactgtgtcacccaggctggagtgcagtggcaccatcttggctcaccacagcctcaaactcctgggctcaagcgatcctcctgcttcaacctcctgagtagctgggaccacaggtgcatgctagtatgcctagctaattttttaattttttgtggagatggggtctcactatgttgctcaggcttgtcttgaacttctgggctcaagcgatccccacgccttggccttccaaagtgctaggattacaggtatgagccactgcgtctggccttggttgtacttaaaaaacaaaaacaaaaaattaaaaaaaaaaacaacagaaaacttttcatggctcccaggagcatttatatgactaacaagttatctttccttgctgatagttccactttcctcgtgtttgacagaaatgactcttagtttaggaactcctcattagctgtttccaggagcagtggggtatcattttgatgcttctttatttcttctatgcaactaaaatacaaagtgaagatacgatgtctctgaaatgataaagctacatttgtcaaaaagcacatattttccattcgacattttggcttaaagaaatgaaaactacagaatgactttttcctttatctgggtctgtgctgtgtatttacctatttaaaaagatatacaggtgaaaaatattttttgaaatgaacttgtctgaatcaagatgcacactcttgcagcaacatcacagggtgtctctgtcactgaggactctgtcctcatttgtgtgggctgactgggtcgctggctgtgggaggcacacatttgctatcttggtgcagcagtttgtagtcagctgactgacttgttcctgcacatgcattttttttcctggcaagtcataattcatgtttttcctaaggtccaaccctattataactgacagatcctatctggctgagaaacatgggcacccttctgtttttgcctcttgttcccaacatatttgtatgcttttcaataggaagctgacctggagtaaatgcccagggttgtctgaggtctctaaatggaaggtgtggtctgaaaccagctaactatggcagcattagggcaagagcgcacaggtaaaggacttctgaaggagggtggagggtgggaaagtgggaggggcgagagctaacatgaatgaaactgaagagaaacagaagttgtggctggcatgcaggagaaacccagattcccattcaccacttcctctcacctccagaaattacccatcattcctctctattttgcaatcctctctatttcccctgaaggttctgctttgaatgctgtcttcccagcagaaatgttgaagggaagtagctcagcccagttcccttctgggccaccactttcaactgtagactttctagtcagagccaagaaggccatggactctgagaatggcatttaaagtctctgccgggctccacttagttccccttcccctacagatgccttattccctcgaaatgcaaacgaggctccatggccacagtttccttcctctttctgtccacattccagtcgttcaccatctcgagaacactggggcaccctcctctacccccagccagagctgtcatttagttgtgatccacaaatctgctaaagagaaaggtgccctgctatcattttgcaaaggcttgcttggaacacattcctgccattcttttttgctgctctgtagcctgagtgattatttgtttagtgtaggagtaaatatgaggggtgctgtgtttcttaaaaacaaaacaaaacaaaacttttagtgacatatgctcattgggggaaataagatagaaataaataatattgaaaacaaacacccgtcaatcacgtgacaaccacaatatagcactttggtgaaaatggtcttaatttaaaaaagaaagtccatctttctaggtatctgagcaattcattactattctatgtaatttttgtgggtttataattaattttgtagattgggatttactagcatgtgataccttgtaaaggacattttacattaaattatcttcctccctagcacattgcctaattctgtcacttgtattattgaggaaacatttgcaagtaggacaaaaagctgtctgcaaatacttaagctttgagttgtttttttctgaagtgcgaacacaatcaattgggttaagtctcccagcccctaagtgggggtatttatgttttttttaggagagaaactttggaagtaaatcagaagtacccagggccaatggccagagtcttagaggaaacataaacctctaggatccagtgagtatccacaaacttagagcactgcgaaggaaacagttgggttagcgttttattaggaaggtcagagatgatttagaaagttaacccttccaaggggtaattacccccaatatgtgtccgttgtggcatgctgtgtacattcactacttttttttttagtgggaaaataacaacatgacttggctgcatgtcccaggaagaggccacagaaatgaaacctcagggtcacatgaaggagattcccctgacatatttcagagctgatgcttaatggacctgaaccagtttgcttttttttttttttttttttttaaaagacagagttttgctctttggcccaggctggagtcaagtggcacaatctcggttcactgtaacctctgccaccccccctccccaacccccacccccgccaacctggttcaagcgattctcctgcctcagcctctcacgtagctgggattacaggcaccccccgccaccatgcccgtctatttttgtatttttagtagaaacggggtttcaccatgttggccaggctggtctcgaactcctgacctcaggtgatccacccgcctcggcctcccaaagtgctgggattacaggcttgagtcaccgcgcccggccccagtttgcattttttacagggcagagactgaagggcacttagagctacctggcccggcctggctttagggacctgatctgtgcagatatggtaattccccacgtgtcaatgcagttcagacttaaagggcacagtcagcccttcgtttcaataccaagaattgcccttttgaaagggtcttgaaggacttgacattctaggatttaattattagggggacgagcagaggcaatgagatgcaactctgaaacaaatgtttaaccacttgagtcaaagaggaaacagagtgaattaaaacttgaaaagtgatcttcaaatcggcttccgcccttgtaggctgattagacgacaactagcatctccaactaagagtgtgtataattagaaagccctctaggttatatctcaagtgagaaaagaaatatgcccttttcttagcctttccttatttttggcctgtatttgggaacttttttttttttttagtttagttttttttttaattgtacttctacaaagtgctctgcaagttgcatgagaatacatacaagagctttagcttcatttaggacatattctctcattcctgaaacttcagattaatttagcatttgatgacctaatattgcatttcctcaattttgttctataagtagcattcatcagagcaaagtttattttatgttggtggcattcagtaagtgatacatcacaaagaaagattggatactcttgcatatcaaatatactttgaactgtgttctctggcaatgccatagattttaactgcaactgacaacttgtacttctaagagagcatttatcattgttggatgtgcgttgtgtctgtctgctaattagcttgtgaagtccctcaggttattcatctcatagaggccagtgtctggcacagaataggtaaccactgaaggtatcctgagtggaattgagttgcaacagtgtgttatagacagtatagtccacaaggaaaagtagtcatcactgagcagaactgcattttgcagccctccatgattttaggggagagcaaatgtaaaacacattttcaaacaggtgagtctgactaatttggaaaattgaatggactgttttctaattttttttttttttttttgcatctgggatataaagcaacagtgaaagttactttttaaaaatgggctgaagagtgagaaatgaatctgacttatcaaatccgcagagggttacctttattactgtgctgcccttcatcccatgcctgcctgctttcatgacaagttgcagtgaagtcgtatttggctgtgagaagtgacttgccttcagggtcactgtgaaccatgtgggtggggccgggcaaatgcatatttaagtactataaaatatttagaagcagaagattcaaaatttgaccaatcagtttgatcaagtttaatttctttttgtttttaaggacatggtttcgctgtgttgcccgggcaggaatgcagtggctccatcatagatcactgcagcctggaactcctgggctcaagcagtcctttcctgcctcagccttcagagtagctaggattacaggcttgcaccactgcacctggctaattttttaaatttctgcaaagatgaagtcttgctatgttgcccaggagtggtcctctggcttcagcctcccaaagtgctgggattacaggcgtggaccatcacacatagcctaagttttactataaccaatgaggcaacctccatggagaccaagaagagggagtggtaccttctagacatcttgacctttgtcttctggttccaggagctgctatcgctaggaaaaggaagtcctgtctgctcacagcccacccgcctctgcacaggtgtccctgggttggctcgttgatggtagtggtggaaattgtctcagtcattacttacagcctgtgaatcctattagcatttctccaattttctctgtttttatcaagggaacagaaatccatcatcaggtatttccacaaaattgacctcatagttccttcctgggtttaatgctcagttgccaaaatagaagtgaagagtcagcagagttgatgtgaagtcacttggagtgaatatcttcaaattaacaagacgtaacatccctttcctgcctttagcccacaaatgcccacctctgctgagccaccttcttgcaaaggaggcttttggaaaagatcttttgggattatgtgaggatcccacatataaagtagcaggagaatctcgagttccatgggaaatgactataggtcatttttccattttcagagaaatcagtgcctttgaaagagaccatagctttttttgcctccgaccgaacttgcctaatttgtggaggtgaatgaggcagcctttgttctctgccagactttagtcagagcccttaagcatggcttgttgtccagagcatggtagagaaatttagagcatcatcgtaactgtagcaccaccaaaaataataaccacaggagctaccattatggaggaattgccccatgccctgcagccacctctcctcctccactcccccactcccccattcccccattcctccttcttctcctgctccagtattgcatatttttacctgactctgcagcgggctgcctcccccggtagctcactcctttgacctagactttgggtctttgtagctctggtgcttgtacctgctccctctgccctgggccaggattctcagtctctgggattggcctcaatctctgtgtttccccagtaccttgcttaccccttcacatgcatgtggattgcacggactcgccctggcttgctcacatgaaacactctcctacccatctcttcctttcagctggagccgctgtgcccatttcagactctgccttcacacctggactccagcccttcccttgtaacagcctcccttcaggaagagggtgtcttgcagcctagaccctcagttaccagagtccctcagaacagcctttcccattctactgttgttcaagtgtgttggtagagaaaatgagagcatcatgataactgcggcaccatccaaaatgataactgcagtagctactattaaggagtatagtgtctagcagctagtgttttggtagaaactcaagccaacacccctgtaatcccagcactttgggaggccgaggtgggtgaatcacctgaggtcaggagttcaagaccagcctgaccaacatggtgaaaccccgtctctactaaaaatacaaaatcagctgggcatggtggcacatgcctgtaatcctagctactcgggaggctgaggcaggagaatcgcttgaaccaggaaggcagaggttgcggtgagccgagatcacgccattgcactccagtctggttctgggcaacaagagtgaaactccatctcaaaaaaaaacaaaaaagctcaagccagaccgtcaggattcaagctcagtctcacacatatgaactgtgtgactttgcaatttactacttcttgccacatcactctttctcatccttaataaataaaatcatttatgaagaagattattaataccatcagtattatgaagactattactcttatcgttgatccttattttctcatgggacctatcaagttcaagtgacctaacattatacaatttaacctattcttctgcagcaacacacccagatggggaggaacccaataacaccgatggtgctattgacatgctcagaactttccagtgacattgtctctgttttcttgtatatgtgcatgcatgaacaagagctttaaaaattgatggggaccctgggctgctggctaaggagctctcctgcctgatgcccagacaatgttgtatctatatacatttgctgggaagaggagtcagcctagctggaaggctgctattgttatgcaaattggaaaagcacacttttaagctacactcttgcaaaatggctgagggtggcagtgtgcttagggctccagaagagtttaatcattgtaatgaatccaatggaaaaggaccaagtttgctgcttcaagatccatattccaccttcagctgtaaaatgtgctgcagatattgcacttgcctgaaataaagcgctctctgtcttttcttcttctgaagaatcctttggctgtgttttattataccggaagcccatttcctcaacttaaagtaattattaacaacaactaaagctttttctcaatgtggttgaattcggtagttttaggattcaggatggatgtagaaaaaggtttgtgtgttgcgcgtaacctcggtcgtgtagagtatgtggatgctttcaccagtattcacatggagcagttatgcaggatctgcagcagcaacagctctggtgaccactcagtcctctcttctccatttccaggtagaccttacatctttctctctgaaagtgagctgaaatctgataccctgtaacctccaccctttgtttctgcaggatttccatccttcagggacaaacagaacaagcttaatccttctggcaaatatcaggtcttcaggtatttgcagacagctaagttgcaagctgtcttccctttcaggtgaatcccctactcctcttaggaagtggtttccagtttcattctcttgttggaaaacttatgccagagagaggctgcaaccacaacagtgagggcttggaaccctgaaccgtgtctcaggaggagtgaataaagatttgttgtatggaactctcacctcctccatcctagataatatacctctgttaatgcagtctcttctcctagtagctcttttggcagccatggcacctcattaatgtgtttgttaaaatgcctcagtcttttcatctgtggtgctgtcgatctgcatttctgtagttttgaagctaggtatggggattttcgaatgatccttattactcagtggagtcttgatcgctattagcttggtccagttttggattttcctgttggtttctaatttagccatgcaggatgtgtactgtctttcccagcttcccatttcccatttgagacatttgccttgtgtgagttcggcatcgaggtatggaaaatgaagcctcatagcagcctgttacctctcctaaaccaatccccctgtcagctcacatttaatgcggataccttttatcttgggtacttgtcagaaggtcttcttgatacctgtgtcttacagatacagctaattgcacattgtaggaactgattaatgcccaggggactgagtgccatcacacataattgtggaacgagagattttgattgcagtcaatgaagattttcctccctaattgtgaggggtcctttttaaatactattatacctgattttcttcttattttttagtttttattttttgagatggagtcttgctctgtcgcccaggctggaacacagtggtgcgatctctgctcacttgcaacctctgcctcccaggttcaagtgattctcatgcttcagcctcccaagtagttgggattacacgtgcctgccaccaggcctggctaatttttttgtatttttagtagaggcagagttttgctatgttggctaggctggtcttgaactcctgacctcaagtgattcgcctgcctcggcctcccacagtgctgggattacaggtgtgagtcaccatgcccagccaattttcttctactcttggactggaaggggctctggtttctgctaccttttctacctttagatgtacgtggtcacactttgagggccttcagttggtgttgaagaggagatggcgggcccaagctctgcaagcctggtgcttgggggcatgttgcctccctgctgcacagcacttcctgccactgtcctggtcaagctgggtttcccgatttacggaagagcttgggctcagagggaggccgtgaggagccccgagagaatgccagccaaggccctgtctggtctaatcctgccagagcctggcctttgggtggaactgggagggccggggaagaaggttatgagaggcacaagctctggttctctgccattacctctcagcctagaagtggccattggatttctttgtatgttttctctttatagtaaataaagaggaaacttctcccctcactggcctgtgtaggctacagttgcctgaggctcaggcttgcctgttcttctaatcattgaccttcttgttagttggattctctttttcttcatttaaaaatacgccacatttcctttccctcagtcttgttgcaagttcccaataattttggagtcctgttaaaagacctgtactttttataaatttgctttcccttcaatctggagaaagagaagaggaattacttgtagagtgggtactgtgtctcagagctaggctgaagcttcacgtacatcatcctgtctgtccttaacaatcctgcaaggctggtgatgctaatttccattttagagtcggaaacagttgagaatgagagcttcacatacccaaggtcatgcagctggagaataggggtgtgcagatgaggacacagggcactgtcccacccaccctaccaggacgaggggcttcatgctaaactctggcccattagaaaccacttgggaaacataaatgcccacggatacagccatttcaaagatccatgcttagaccagaacatttagcacaaagcgaaacccacagaaacttcaaaaggaataaaaatatcatgttaatgttaagaaaaattatttaaaatttggaaataaggcataaacgtaacagcagcatgtagttcttcaaatgttagccaggggcgttgcttaacaagcctacccaagggttatttgtttagggtgtcatacctggctttgtttttaacttttaaaaaataacaactttgtggccgagcgcggtggctcatacctgtaatcccagcactttgggagactgaggcgggcggaccacctgaagtcaggagtttgagacaagcctggccaacacggtgaaaccccgtctctactaaaaatacaaaaattagccgagcgtggtggcgggcacctgtagtcctagctacttgggaggctgaggcaggagaattgcttgaacctgggagacggaggttgtggtgagctgagattgcaccactgcactccagcctgggcaacagagtgagactccgtctcaaaacaaaaaacaaacacagctttgtaatataattcacgtaatgtacaattcacccatttaaagtgtacacttcaggggtttctagtaatttcagagttgtgtaaccatcggcacagtcctttttagaacattctcattgccccagaaagaaacctgttagcagttactccccattctctaactgggcagacttctttcggatgtatttattggtggactctaattcttgtttgacctagctttaccaacttagttgttccctctctaaaccaaaaagtacccgaaacgtgtctcaatcaatttagaagtttattttgccaaggttaaggacgtgcgcccaggagacaggtctgtgcttttcgccaaagatgattttgagtgcttcaatgtttaaaggggaaggaggaagaaattgtaaaaggtgttggtagataagaggcagagagttgcattcttttcagtttttcatcagctgttcacatgtgagagggagtagaggaatagtcacttgtgcattcctctagctccgtgaatctgctttttttgtttgtttattttattttatttttttgagatggagtttcactcttgttgcccagactggagtgcagtggcacaatcgcagctcaccgcaatctccgccttctgggttcaagtgattctcctgcctcagcctcccgagttgctgagattacagccatgtgccaccacacctggctaattttgtatttttagtagagacggggtttcaccatgttggtcaggctggtcttgaactcctgacctcaggtgatccacccaccttggccttctgaagtgttgggattacaggcatggaccaccgcgcccagcccatattcaacttattttttaaatgataattcataaaacactttaggatcttgcattgcaatagcattgttatgaacattgctctaaagttaagatttttagtttcttaagtaatacattaatggttgaaaaaattagagaatatagatgaacaaaaataaaagtaaaattaaattttcccaaacactgccctagagacagccccgtatcacgttggtctgtgtccttatagactttttctcttgcaacaacttacagtatttttaaaacagtaaatagccccacatcatgattattgttaaatataagttttttgaagcactgtgtataagtgtagattaaaaaccattttggtttactgtaaaaactctggaagacaacctaggcaacaccattgaggacataggcatgggcaaagatttcatgacgaagacgccaaaagcaattgcgacaaaagcaaaaattgacaaatggcatctaattaaacttaacagcttcttcacagcaaaagaaactatcaaccgagtaaacaacctacagaatgggagaaaatttttgcaagctatgcattcagcaaagatctaatatccaacatctataaggaacttaaatttacaagaaaaaaacaaccccccaaaaaagtgggcaaagacatgaaaagacacttttcaaaagaagatatacatacaaccaacaatcatgaaaaaacactcaacatcactgatcattagagaaatgcaaatcaaacaaaataccatctcacaccagtcagaatagctattactaaaaagtcaaaaaatattagatgctggtgaggttgtggagaaaaaggaacacttttacacttatggtggaaatgtaaattagttcaaccattgtgcaagacagtatggccattcttcaaagagctaaaagcagaactgccatttgacccagcaatcccatggctaggtatatacccaaaggaatataaattgttctgttataaagacacatgcacacatatgttcattgcaacactattcacaataggaaagacatggaattaacctaaattcccatcaatgatagactggataaagaaaatgtggtacatatacaccatggaatactatgcagccataaaaaggaacgagatcatgtcctttgcagggaaatggatggagctggaggcaattatccttaccaaactaacacaggaacagaaaaccaaatactgcacgttctcacttataagtgacagctaaacaatgagaacacatggacacacagaggggaacaacacacagtgaggcctgtcagaaggtggagggtgagaagagggagaggatcaggaaaaataactcaagggtacatggcttcatatctgggtgttgaaacaatctgtacagcaaacccccatgacacaagtttacccatataacctgcatagatacccctgaacttaaaaaaaaaaaaaaacattttggttttagaattctgaataacaattcatcatatttatttttaaattcattttgtcttatattttctggcatgcagtttggaaaggtaatatatttgttttgtaagatttttctttagtttttaaaatttgtgggtgcttctatgccttcatatccttctttgtatggagactttcctagttcctttgtctcgtgtttttccccagttgctctccactgttacccatgggcattagaatcccttggacgccttcagatttcctttttggaggctcctggccccattcctttgtaattatgtggtgttccacgtccctgatgttttattagttcccaacatacttgatataagagaggtaattagtgtattatggcttctttttgaattgttccccaagataagcagagggaaatgttacatgggtaaaaatttacataataatgtgaccaggctttgtcgcaaaagctcactgtaatcatgagaaaatgaaagcattttatttatggaaagtttccgcatgtatttgtctctaagaattaaaaattgccactgcattatggtggcctcagatttcagaagaaacattgtactgtgtttacttgtaccgtgccctgcctttctaaccaaacttgaataccctcttttctgttctgagactgttctatggccattccaccattgattgaaaccaaagccaaaccagaacattaaatatgaaatgctttttccctcacccacaggagctttgtaattatatggcttaaaaaaaaaaaagcactgaattcttaaatgagagtgtttagtaaaatatttggaacagcttcagcttcctactttccttcagtgaaccatggctgaaggtaacgttttcttggtcaatgtgaattgcgttccttcccccggtgcttgattttcctttgacctactccgtctccatagtttgcatgaggtggcccaagcctctttccataattttacataggtgttaccgcagaacgctgccagatggctgcctgtcttggtggggagaagtccctggatctgctgtcctttttcattctcagcactagcgtcatttctgccacaagtcttccctgaactcaaggctgggctgagggctattccccaggcactcacaccttacattggcaagaccttcctccacttgtatgatcctgaaatgttctcttagtgactcttttccaaactaaaagctccaggggggcccctgagcgaagttgatctttacaaccaccagggcccagcaccatatctgggatgtagctattgctcgataaatatttgttgaccagaaggtaagtgaaccgagtactccctatccactgtgtgtctacattcctgccaacccctgtatatatatgacaacgactcttcagtcccaggcctaatagacttgccccagtcagctccttcctgatttcatgtaagagtgacacgattgaatacttcctccttcctgaaacgtttccccctgttggatgtcggggctcctgctctctgctcgcctctctcctaggcctgtctctgaggtttggccaactcctcttgtcacccctccagcactatgagcaaggaattctggttctccccacaccatcttttttgaaattgcattcgaggtctccagcatctcttctaggcagatacctgaagggactgggcttcatgtagtcctcccaggcctgccagactttctggccttcaactaggagcttcatgcgtgtctgtggaaggagtgaccaatggacaaacatacaactctattttgaaagtgggttggggctgggtgtggtggctcatgcctataatcccagcactttgggaggcagaggtgggtggatcacaaggtcgggagttcaagactagcctggccaacatggtgaaaccccatctctactaaaaatacaaaaattagctgggtgcggtggtgggcacctgtaatcccagctgtgtgggaggctgaggcaggagaatcacttgaacctgggaggcggaggttgcagtgagccaaaatcgcgccattgtactccagcctgggcgacagagcaagactgtctcaaaaaaaaaaaaaaaaaaagaaaaaaagaaaaaaaagaaagtggatcgagtatgaattatgaaattgcaaagactagaaggatacatgtgggtcttgcaaggccttgcccttgagtttgcaatcaactggcttgtttaataaacaaatatgtgctaaggatgatggctcctcatggaacttagggcatgcaatcattgacttcagaataaaactgtagcttaggacccaaagagaagaacagaggtaaggaagaatcatgagctcactcgctgctcaccccttccagtgcccacctagagtccttcagggatcatagcttcaaaacccttccagtggattctttctgaagttcattctcagactctcagtgatctttactaccttttaaattaggaatgttcttcacaaaaaggaatgctacaggttacttcactgagtacgaggtgaagattccaagtgttcattttctgtgtggctgtatattatttgtgtgggaacccacattcttatctcaccactaaagatcaagaaagtactttcaccagccagcaagcatcacttgtatgtggtcattgtatgattacaacggcaggtaccagcaggtgtattaagcagaacacacacatacaaaggcaatgattttaaattggactttggattaaagtaatatatttaacccctcaagagttctgactgtgttaaactcatttataatcatgagcaaatgagtctatactaatgcctcagatgtttttgaatttggcaacttctatttcctaattgtgatttaggtttaaataactttttcacttatgctcacctgtaatctttgtatgcctttatttctccccgtggaagtattcacaggaccctaattcattagtttggtaatagctctttactgctttggacttaaaggtaccctcggtatttttaacagacacagatgtgctgtcccgtagagctgtcggggaagaatgccttgaatcccgaaccacttgctcttgttcatagtacttaattttcacttactgaatcatttgctttccaaaaaccaccttgttgcatgtattagtttgttagggctgtcataacaaattaccacaaaccgggcagcttaaacaacgaaagtgtgttgcctcagttccaaaggctggatgctggcagggtgggttccctcagagagctgcaagagagaatctgttccatgactccccctggcttctggtggtttcccggcaatctttggcattccttggcttgcagaagcagaagcatcaccccagtctttctccatcttcacatgagttctcccagggtgtgtttatgtccaaatttccccttgcctttatttttattttattttattttattttattttttcgagacagagtctctgtcgcccaggctgtggagtgtggtggtgcagtctcagctccctgcaagctccacctcccagttaacaccattctcctgcctcagcctcccaaatagctgggactacaggtgctcaccacctctcccagctaatttttgtatttttagtagagacagggtttcactgtgttatccaggatgttctcaatctcctgacctcgtgatccacccgccttggcctccaaagtgctgggattacaggagtgagccaccgcacccagcccaaatttcccttttttgtaaggatgccagtcatattggattagaggccttaccttatgccagtgtgaccccatcttctctaattatatctgcagcagccctttttccaagtcagatcacattctgaggtactagaagctagaacatcaacatgaattttatggggatagtttgtattagtccgttttcatgctgctgataaagagatacccgagactaggtaatttattaagaaaaaaaaagtttaatgggctcacagttagttctgcatggctggggaggcctcacaatcatggcagaaggtgaaagtctcgccttacatggtgtcaggcaagaaagagaaggagagccaagcgaaaggggaaaccccttgtaaaactgttgaatctcgtgagacttactcactacgacgagaacagtatgggggaaagcactcccatgattcagttgtctcccactgggcccctcccacaacacgtgggaattatttgagctacaattcaagatgagatttgggtggagacacagccaaaccatatcacagttcaacccctaagagtgtagctaatacctgaaataatcagatgacatttttatttgccaattctgtgtaggagagatgggtagaaataatagtaaattgcattgagtgtatgatcagagactattgagaaaggtgattgttgtcagatcctaaattatatgaaataatttgggggattgtttttgacatatgtcatataaaagtaacttatttcccaggtttcttattttttctgaccagctctttgtccatactgattcaataatttcccaatgttcttcagctaatggagaaaaagagtttgaccacatttgtaaaatccaatctaactaatgtatttatgttttagctttttattatgtacattttcatatatctggaaaagcagagagaatagtataataaaaaccatatactcttcttgcaactttaataattgtcaactattaccaatcttgtttcatccatcttctctccacatatttttcttgctggagtcttattaaggaattgcagatatcctgttatttcacttgtataattttttttaagttagagaaatgtaatgtcatactttctcactgttgaaattgaggagaaaggtaaaactacttaatgataagtattaggacatacaccttggcttttacattgtaatgaatttaaagaaggaaaagcaggagataaaggaggagtggggagggtggggttgggaagagagaggatgtgagagacaccagctcctttacatgtttccctccctaccacgtttccctccctaactaaactctgagctccttgagggcagaaactgtgtcttggtcccccagttaccttcataccttatagggaattggtgtatagtaagtgtacatcagtaaacatttgctgaataattgaatgaataaaagaatgaacgatgctcccccaaaaccttgcatagaaagatacagagacatgctcagaaaaatacaccacatttagctctagaggtaagacaaaagaaataaaaagatcctgaaaggtacattgcttctcgcagttttcaggatattttctctcacatttagatcccgtgtagcatttctgcaaccctgccaagaagcaggactgtcctaacgtgctgagtgcttatgcccttagcgagggagagaggtttcatccatgctgtgagagctcattcttcatttgcattacgtgagaatcgaagcctgagttctgagtattttgactaccttccatcctctcagaattctggagccacactttgttttgcctgccatttgggagaagattggggttgctgtgaagcttaaagtgctacacattttgctgaagaaagagattgcagtctcagatgtccatactgccggcagacctacatgcttatagatgtgagtgacattgaagcaggggaaacaagtcctgttccactacactgaggaggccttggactgaaggcaagagagaggagagaaggcagagcatacagtcccaaagccgagtccagcctccttagctccttgcaactcacactcaaaccccagtttaagtaattccagactgaaaaataaaaaccttaaaaatattgcagagagaagtttggtattagagtcatgataaacccttgtatagaacgtgttgcaatgattattttttagggtcaaaatgaggaaacctgacatgcacactgggttttggatgttcagacatgaagcttgtactgccaagtgaggaaggctttatgcccttaagagattaaaggaaagttggactcatcagttgattctgaaatcaacccccaaacactgcttgatctgagttttcaaaagctaacctttgggtttctctttaaatatttttgcgtgatttgtcatatacttatctttaagagttttgttgttgttgttgtttacataaagcagttaccatttaatgctacaggtactcaagatttcattcatgcatattcttagtcaatatgagaaaaatctatttcattgtagttctgagttgaatatgggaataagttgaaataataaaagaaggagactgtttatctgttggcaaacgtgtcgctgtcatcatctgcatccttctaagtgtgtggcttctgggccatcatgggcgagtaatgaccacatcccattcttatcttttctccttggctctggaaggagtcttttatactggtgattgccggactgttcttgagatttttcttccctcaaccctctccagcccccaggctctcttctgactcttcccacccctcagacagcctcgtcctttctaccatcaaccacaacacttgggtgtttccaggactcgccttgcagttctccctcaccatgaagacatctctcatggcttggtccacagtcccccgttgtcttttggcctctaaccttgaatctccacctgcttgtctgacacatctatctgggtggcctaacagtatattatacttttctcaaattgagacccctgtttattgtttcattatgttttattgatatataatagttgtacatattttgggggtacatctgatattttgatgcagatatcaaaataccatccaaagagttctttggcagcgtgtgcacaggtatcagaatatcagatgcacccccaaaatatgtacaactattatgtatctacatacaatgtgtaatgataaaatcagggcaactgaaatattcatcatctcaaacatttatcttttgtgttgggaacattacagatcttttcttctagctattttgaaatatacagtaagttattaactataatttccctgctgtgctatcgattactagaacttattccttctgtctaactgcatttttgagcctgttaactaactggtcttcatccctttctcctcttttttcttcccagcctctactcgttacctctgtgagatctacttttttagctcccacatatgagtgagagcatatgatgtttgtcttcctgtgcctggcttatgtcatgtcacataatgacctccagttcttttcatgttgctgcaaatgataggatttcattcttttttatggttgaataatactccattttgtagacatactacgtcttccttatccattcatctgttgatgggcattaggttgattctgtatcttggttattgtgagtggtgctgcagtgaatatgggattacagatgtctcatcggtagactgatttcccttctttctgatgtatacgcagcagtgggattggcggatcttatggtagctctgtgtttagttgtttgggagagtccatagtgctttctgtagtggctctaccactttacattcccaccagcagcatccctgccttcccttttctctgcatccccaccagtatctgttcttttttgtccttttgataatagccattctaactgtggtgggatgttactgtgattttcgtttgcatttccttcataattagtggtgatgaacattttttctcctacctgttggccatttgtttgtcatcttttgagaaatgtctattcaggtcttttgcccattttaaaattgttgagtgaagagtttgagaatattttttccaattctgtaggttgtttcttcactttgtttcctttgctgcacagaagcttcttagcttgatataatcccatttgtctgtttttgcttttgttgtctgtgcttttgaggtcttaccccaaaattttgtccagaccataatgccctgtagcataaaacccctgtttaaacaacatgaagagtagtttctcctctttgagctcgtataatactcagattgcaagtccccaagtccaagttaattcttaacttgccccttggtcttctctgttcattttctacaacctgccaatttaccctttagtatttagaattctttctgtggaaagtacagaaaactcattcaaactggcgtgaacaataaaagcgtgtatgatatgactttgtggattcaagtgtattaaattatatggtatgtaaatgaagaaaatgacatttttaaagggtatttaatggttcgtgtgactgaacagtctgaaggtgatagccttgctgacgccaagatctggtttctttctttctcctctgagtcttctgtactctcagtttcatcataaggctcacctcttggttgcagagtgctaacaccatttactcagttgctctggccgggagcttggggccgttcttgactcgcctttccttcacatcccacattcaatctcagccctgtcttcaaagtatatctcaggtccaaccaggaaggaatgcacaaaagatgctcagtagtctttgttgaaattagagaaaaagaaggcaagggaagaattaaagatgaatctcctaaagaagggggaaagaggcttgcctgcttagaattgggaatactggatttttgaaagagttcattgggagcacgtgcacagatgctgaaaggaagaatcaaggtgctgtctgaagaatgacattctttataatatgtgatagagtgcatttatttgatttgttttcatacaacttttaatgtgtatcccaggagaagactgttttcattgttacaaatctgaaaccaataattttcttttaacatgcagatataatataagctcactttttcattactttccctacaaagctgaaagcggttgacttgccttagagattttcctttcattatattctgctgtgacgttgcctttcattaatcccttccagctaagcaaaatttaattagaaccatatcacgtgatggcaaccatttttgtatttaaaaaaaagaattcaaggaagctcagctaccagtcttctcttctaagcaaagtctattatatttagtaggttctttccagaattcagaatatgttacataatggctttttcttcattaattttggataatagggaatttctatgcctgtgttccgttttacatgactgtgacctgaatttaaaatgacatggacttgagggtgaaaggaaaggaaattattttttaaaggagaaatggaaaatgacccttagcagtgcatatatatatatatatatatatatatatatatatatatatatatttcccccctcaatgaatatagcaatccgtgttagatgtaaatagggatgaacccattttgcatatagattaagtgaccaaatatctcagtagtttggcaggaaagccaagcctgcagcctgaggggcctcacttccaccatcattattgacaactatgtgctcaagcgagcagggagggtgcaaggaacacgtctccaatccttaaagattatatgagtcctttgctctcaaatctgaattttccctttgtctccactttatgccagcactgattttatttagaattttatagaatggaagcaaattcattctttctttcatcctttcttttctttctttcttttccttccttcctttccctttccctttaattcctttctttccttttttttttctttcttgagacagggtctcactctgtcacccaggctggggtacagtggcgtgatctcagctcactgcaacctccacctcctgagttcaagccgtcctcctgcctcagccacccaagtagctgggattacaggcatgcaacaccacacccagctaatttttgtaattttagtagagacagggtttcaccatgttggccaggctggtctcaaactcttgacctcaagtgatctgcctgtcttggcctcccaaagtgctaggattacaggtgtgagcaaccacacccagcccaaatactctttcttgatgtcataatgaactcaattatgaacacaagtaatcataaaaagtctatataagcaaggttcttactgcctcttcctattcctcttatttataatttcataaatattgctctaggttgataagttaaaaatttttatagtaggttatgtataagatttaccattttaaccattttaaatgtacatgtcagtggcattaagtaccttcccagtgttagacgaccatcactaccatccatttccagaactctttttttttttttttgagatggagttttgctcttgctacccatgctggagtgcaatggcaggatctcagctcactgcaacctccgcctcctgggttcaagcgatttttctgcctcagcctcccaagtagttgggattacaggtgcccaccaccatgcccggctaattttttgtattttttagtagagacggggtttcaccgtgttagccaggatgatctcgatctcctgttttctttttgttttttttgagacggagtcttgctctgtcacccaggctggactggagtgcagtggtgtgatctcagctcactgcaacctctgcctcccagattcaagcaattctcctgcctcagcctcccaggtagctgggattacaggcacaagccactatgccttgctaatttttgtatttttagtagagacgtggttttgccatattggccagggtggttttgaactcctgacctcaagtgatctgcccacctcagactcccaaagtgcagggattacaggtgtgacccaccgctcctggctgtatgaattcttgagccaaacacaggtgactgttatttgttctgtttctgaaatatactttcgacaagtggtgaaaactctccttaatttccatctagtttacttccataagcaagattagcaaggaatatggatcacaagattgggtgttctcagttttaaagccaggcaatgtcaagatttgttatttggccaagtctgtggtctttattatttttttgtcccaccatgtcatttgctcagtgtgatttgtgcatttccagtgtcgtccgtcactgctggggagcagacaaatatcacatagaggattagagaaagtgattttgtgcttagaaaataattgaatgaagatttactttgtgactggaagctgcaggatagcatcctgttttaaaacctctcattgggttatataaccagaggtgaccaaagtctttgaagatgaggcaccatctctgagtgagtttttgttggatagcctatgcttgcttgagcaaagacttgtttaagggccaaggggggcccccacgacaatcatcagatggaatcttccatgacacgtctccacttccttccagctgagtggctgttgtctttaagttgccttccttctaccaaggtcaggcagatgtttgttgaaggtttgctatgtaacaggtaccaccttattacctctttactccaatttcctttgcttcatataccatggtgagatgaattcctttagagccccaaattaaaaaaagacaaaaaacaatagctcctgatttttagccaggggaaaccctatgatgtccatctccaggcaaacctaatgcatccttttgttttattgagccagtcttttcctctttcaacaatgctagcaagacttctcaaatgtcttcattagattatcttacaaaatatgcattacccaatttagtttggaacttggacccaaagatcaaggccagccatctctgatttttggaacctctggctgttgctcagttttctggggcagcctttcccaggcacatgctgcatgcagccagcgtcggccaacctccaagctcctctttcctgttcccctcacggtaagtgggggtgttggggaggagagggggcatctacactttttctccttagtcacccaggattgggcacattctgtttcttcttcctttggagatcatccattctgaatttcgaatcttcaagtaggcttagagggctctttatccctcagataacgtgtctatgagtggctgtctggaaacacatggcctttctgtctgcctctcatagggtgaatccagtccttcaaatgggaagctttcgtgtaaggtaggtggggagggggtagttaaggcaggttgggaggaaattattttgggataggtaaagctttttgctgcctctgcaaattgtgctggataatgagggcccgggtcttcttaggataacattcggcatgagtttttttgaggtgtgcaatagaaatacttccagctgtagatacataattgcattgacctgcaaatcatagacagaaagaacaggtacaaaaagcaaactattcttccatgggatttgataagtgtgagttttcttaacagtgttcactgaatgtggagatggttttttttaaaaagagatgaaaggcccaaatgtttgaacgattaagtagggaataggaatgcttattttccaaccaaaacactacatctgtaataaaccgtgatgaggaagtaatgcccctgtaacctttttcctttggtaatttatctttcttattccagtggatgaaagatgactgtgtgcctggggagagagagcagatcagattaatttgtgccatcacagcacggctttattatccgtccttcgagagttttgcaatcaagatgcttttagcagaaacacagtggagaaaggccacttctctcagggcttgtaggagctaagcactgccctttgagtgtctctgtgctgcctgggcagccaagagggctgttttcttcgattcacactcacctcctcctgcccctgactgtgcagggcagacaggtgtggccagcgtgctgggcagccagcaggatccctcacccagggcacctccccctctaaagggatgcttgctttaagagctctccacttgtcacctttctgtggatggttcctgtttggttatctggctctttgtctgctcaatgccaggcatgcattttcttttttaaaatgtatatttttacagtgacatggtatcatgagtacctttaaaatgtgtatttttacaatcacattatattatgattaccttaaaagaaaaccctttaaaaagaattatccatgattctatttccctaatatactgtatcttcatcctctgagttgtatatatgtgtatatgtgtatgtctatgtaggtatatttgtgtgtgtgtgtgtgtgtgtgtgtgtgtatgtctattttgtcatatacccattttcctgttacccatgtaaaaaatcttggcatcagctctttaccctttctgctctggaaatcctgccagtgcatatgacatgatgaaaggacggggggctgtggtgtccagcaactcttagcatgaatcctgattccatcacatggtgactcagccttgggaaagaccatcctttgtttgttggttcattcatctatccatctgtctgtcctccctgcctcccttcctgtctcccgttcacaagcattcactgtacagcatgctagatttgggggatctgggcagcattttcccatccataaaatatagatattgcagcatattaaggagcattgttaggaggattcaatttgctaataatgcatgtgaagggacccagtacaacaacagcaacagcctggcacgtgataagatgctcagtaaatggtgctgtgtggtcagtcagcaagtctcatcgttcttgtgtaatttccctggcctctgttacttccatttcttagcagcctgcatgatgatggccaattactttcatacctagactatgcaagaggcttctaatgaggcattataggcctcaatctattctattaaattcttcctattaccaccatttgcacttctaaagcattgtttttgtctgtgttactctttgttcagaacctttcagtgatttcctaggctattctgaatttcttactggccactcacagccctctcagtactctgggctcctcttgggatttcagctctgagccatcctgccaccctcttccacctacggaaatgactcaccctctttggtcttctgtatctactgccatatgtgcagggaactgtattatcattggtgagaggagaaaatagcgtatgagccacacatttgggaaactctaaccttccttgtgcagagtcttagttcatttttgctgctataacagaatacctgagactaggtaatttgtaaagaacataaatttgttttcttacagttctagaggccaggaagtcgaagatcaaggtgccagcattgagcaagggcctgtttactgcatgctcccagggggaggaagaccttgtcctcgtgtggcagaaggcagaagggcaaagagacaaaagggggctctactcacctttttgtaatgacattaattctacccctgagggcaaagccctcatggtggagtgaccccccaagggtcccatctcccaaaactgccaccatggcaaccaaatttcaacatgggtttcacagctgacatgaaatcaaaccacagcatgcagtaaagacttatgactaacctagtattcctgagggtatactgttttttaacatgttgttattattcaacaaatgataagagtagtagatgatgcctttttggagctagacttcaagctttcaaggagagactaggtcatttattttttgcgtcctctatcttattaccatcaatacaaacctttcagggggacatgtgcagtagctcaacgcctacaatcccagcactttgggaagccaaggtggacagattgcttgagcttaggagttcgagactagcctggccaacatggtgaaaccgtgtctctacaaaaatgtaaaaatgagcagggtgtggtggcacttgcctgtattcccagctacttgggagtctgaggcaggaggatttcttgaacccaggaggttgaggctgcagtgagccaagatcaccccactgcactccagcctcggtgacaaagtgagacccggtctcaaaaaaaaaaaaaaaactcttaggggattactttctataacagttattttgttgattcatccttaggactatttatcaaaaccatgttaagctttgaaaatatttactgggtagtagattttgctgaatttgcaggaactctcccaactggtgacagaatctgtagcaaaaagacagatataggaaggtgttaaggtgtttgctaagattgttttgattcatttcaaaggtctgttttctgtagattgcatttgtgtctgaatgagtttattaagttgctgaggaagtcctgcaacccacatttagggatactcacattatttataatcagttattctctttatattttatttcaaccacggaatacaatgtttatatacatttatatgtgtgtgttagtgtgttgctataggatggtgcaaagtattttattttattttattttattttattttattttattttttgagacggagtttcactcttgttgcccagtctggagtgcagtggcatggatcttggctcactgcaacctccacctcccacgttcaagcgattatcctgcctcaacctcctgagtagctgggattacaggcgcccatcactatggccagctaatttgtgtatgtgtgtgtgtgtgtatttttagtagagatggggttttaccatgttggccaggctgctcttgaactcctgacatcaagtgatctacctgcctcggcctcccaaagtgcttggattacaggcatgaaccgctgtgcccggctaggatggtgcaaaatgttctaaattttgtttcccggtttctactttgggaaactgtcttacaatctgattctcctctccctcaacttcagagagtaagagccacagtttgtggccctgtcagtgctggcattttgggactctgttatctatgagtctaatcaataccaaatgttgctgattctagaatgaaatgccttctgattgctgtttataagattctgtctgtagtgaaattaaattgacttctaacagcaagtatctctgtttggaaaataaagctcgtatgttaaatcatgtctattctaattttagtttcctttttctctaccagtttgctgttttgtggtccacaagaggtgccatgaatttgttactttttcttgtccgggtgcggataagggacccgacactgatgtaagtagtcctgaaatcatgatttgatgtcaatgtggatttctgagctttaatttttttaacgcctgtgcaactgttagttttggcacttactgttaatgggaagactcaattctcatagagcgttggcttgtagtaatgagcagatttatagcccatatgagctctggactacatcttagagaatttctcagaggagaatttcttggtagcatgtactgttccactttgggcagctgcattgactaaatccaccaaatttattgtaatagctttcacaaacacaatgcagttgttgacagattttacaatgaacatttatcacccttcagtttatttccgttccctcccctcccctccccacccctcccgtcctcttcgatggagtctcactctgttgcccaggctggagtgcagtggcacgatctcagctcactgcaacctccgccttccaggttcaagcgattttcctgcctcagcctcctgagtagctggcactatagatgtgcaccaccacgcacagctaatttttgtatttttagtagagatggggtttcatcatgttggcaggctgttcttgaactcctgacctcaagcaatccactcgtcttggcctcccaaagtgctgggattacaggtgtgagccactgggccctgccacccttcagtttacttctaagctgaaataaaccaataggagcatcattgctttgggccaatgtaacaaactgctcctggtttactccaggggattcttgctgccttttcggtgtatgttaaaaatgctgctgctgattgaaataatttagcatctgtttcactgaacagtgatctctgaagttgcccatgtgtgaacacataatttcctctctttgtggacaattctgatggtctctgttgcatctcttgtgtacttaaaaatgggatccacaggccgggcacggtggctcacgcctgtaatcccagcactttggaaggctgaggcgggcggatcacctgaggtcgagagttcaagaccagcctgaccaacatggagaaaccctgtctctactaaaaatacaaaattagctgggcgtggtggcgcatcctgagatcctagctcctcaggaggctaaggcaggagactcatttgaacccgcgaggcagaggttgtggtgagctgatatcgcaccactgcactccaacctgggcaacaagagcaaaactccgtctcaaaaaaaaaaaaaggatccacaaaggagtcacggaaaataccaatgtctaaaatatgttggatagagagaaacttcagctgttatatgaaaagtaatattttaactgaataaaaaaaattgtcaggcaggcttagaagggtagacatttctgttctgaattgcttttgcttgatcagtttagtcactcaaattgtgtgcttgaagcgattcccatctttaatgcctgttcccatcaggaaactttaatttgaaagtggctatctcagtgcaggcaagactaaattcttccctttgcgaaagatgacatttttgcagtgtgctctgagggattccgatttgcgttgttgtaacacaagtaagaaggaagttactgtttggtgttcagtgcacgggaacatgcacaatggggttagggtgcttgtggaggcaagatagagtgcctgttgtgggctctgagcccacatacacatacacacgggttccacaaaggctcacaggacatgggagccagaggaagctcaggcgtcaccttgttttataacttcatggacaaggaagcccaagtccatgaacgttgagtgacttgcctgcatacaaacaaaactagttagtgtcattcccctgccctcccccctgctccccgcctcctgccccctgccccggccactttccatacttctcttctggcatattctggaatattgtcttcctttggggcattttagagataaaaatagctggaacgtaaagtactaacttttccaaaaagccaagtcccattgcacttgtttggagttgtctaaaacctcatgtcatagcctttcacttccttgctcatcattcccatctttatcttgctgtatttttctttcctctcttctcttctctctcctcccatttctgccccatcaagaatgggaagggaggatgggcaggcttcaggatgtgagtagtttgtctgactcccttctcttcctttttcttccccctcctactttttcattcttttggttgagtattctttattgagaacccataatgggccaaagtctgtgcttagtcctggggtataacactaagtacagagatatgctccttgccttcctggacattctgctgtgggaaggcagacattaaaatatcactaattcaaataggatacaggtacactgagcaggtttctctaagggacatactgcatttaaactgagcttgacgaatgggtaggagataggcagacaaaaggaagggtgtgtgtgtgcgtgcgtacgcgcatgtgtgcacacatgcatgctgggctgtatggggccctggaaaaggctgtttcagacaaagggaagagcaagtgagaatgccaagatatgggaaggagtttaatcaataacaaacagaaagctgggagttgggtgtctggcaaggattttgggcacaggcttaggagcattgggggcccaggaaagagtttaaccttaagggctcatctcttaatacagtcacattggcggttaagtttcagcatatgaattttcaggacatggaccattagcagacacattcagtgtgagatgcctgacgctgggagtcagttgagtatggaggcaggtgtggcagtcagaagtggggtatgtcctaaagataaagattcctatgatttttttttaatgccttggatgtggatcatttttgcctagggagagggtatagagtggggagagaagggattaggtctcaggagagagctctaaggaactccaacatgttgcatgggagaggaagatcagggtagggaaaccaagaaggggcagccagaaaagtaggaagaaaaccaggggagtgtgatgctgattgaatgatttcctaaggggctataggccaatactgtgatcgtatctctgtgtttgttatgaattctctacgttgctgaaactgcgtataagtaggtaacatacagtttgtaaaggacaatcttatttacatgggaaagtctttgtttatgcccaccatggatcaattgatgcctgttaattatttttggtaactcatttcatgctcagattttttatcttgtttggctgatcattatggggtcatcctactcatagggcctggagccaggtaaaaagctttagaaaagatatgcttggtgcgaaatataacggaaacacacccgtgagctgatgcccagccatgtcctgctcctaatcttgtgttgactttctgtagatgctgagtcttacacttaaaatatccttgaaagtaatgatgattagatgaattttttttaatgtgaaagagaaagaggtatattagatattcaatgcagtcctgcctgcctggttcacaaaagatcatgcattcacccaaaagatcatgcattcacacctgcatccatactcaactgactcccagtgtcagacatctcatgccgaatgtgtctgctaatggtccatgtccccgaaaattcatatgctgaaacttaactgccaacgtgattgtattaagaggtgggccctttaggaggtgattcagccatgaggtggagccttcctgaatgggaccagctcccttattagagaggtacaagggagctgttacctccatttccccttttagcccttctgtcatgtgagtacacagcaaaaaggcaccatccaggaagcagagcccagctggtgccagatacagaatctgctggcaccttgatcttggaagagaaaggagaaaatttgatttttggtctttggagcaagagacctatgactagggctttctgcagccaaggcctgagaagtgttgactggctgtatgcaggatgattttacttactgtgcaaatctgcaagcaaatcttatgaaggtacaaggtggccaaactgtgctgcaccagggagatagttggaaaatcatgaaggcattgggaggtagaactgagctgagatgctagaattttcttattttatccttttctgaataccatttttctgcaaatcccagaagtattgagccagaaggggtgttaaggatttatctgggttaaccttactttgtggatgaggagacaactaaggcaaaaatgatctggggtactgtcatatgttatctcttgagtatccagtgggcttgtggttgattctttcaaggcaattggccatgaagagaaacaagatgttggtggcttgactggattgtgctgccagtggagcacattgacagctattccttggtgcatttgttgaaaattctggtcaggtgtttggaaaactagcagacttattttaccatcttgagaattaacttatcctccagtccttttcagtgtcttagaaatcaatccaataaaaaatgcctgctggcaggctcagtgaggaagaccagtgaaaagaatgggaagtatcagaatttaagagaaaaaaaactgccctaagcatttttcccctgaaaaatttaaaaattttaaattaggattttttttttcgtaccatggagaatggttaagatgtcctgttcatgtgctgcttaatagtaccttcgttgagcttggcagactctaacacattcacagacggggaaaaagaaggtacaatccttgtgaaatcctcaaatattgtacctgctctgccatcttcaagatgaaaggatgggaaaagtactgagaaataaaatagcggtacccaggttacagtagccagatgggaagacattacaaagttcttttgaacagagatgctcttcaagactcaaggagcagtcgtagttgagagtatgcattagtgcagggaatcttggcagagaaaaggctcctgggttcacagaaggaccctccctggagatcctcaggccaatttctcaagggtcctctgccccttctggatgagatggcattctgtaccagcaaatctagagcaaaaagctgagcaattcctagactttaagtccgtccccatacacgctgagtagagaaggaatgaaagcagaagacttaagagaaccaacgttagcggtgagctcattccctggtactgcctgtgtttgcacccggggctcaggcttggatgctgaagtatgtggctcatggaatgagcagcagctgtcttcttacctggtgttgggaaggcactttgaattggtgcaggatttatgtttccaggtgtgtggccctagaatgcagcttggggctctgcccagtaccccattccagcatccgaggtttcatcagacaacataaaataagacaaaagtgctctgtgtttagaaatggcttctcccccttctccaccaaattaagatgcagactcggacatgggcaggtagaagtcgagagtagagccgtggtttttggggcagtgggagtagtgagcctggctttgctctgctgaagggcagcaagtgcccatgcttctttggctgccattgattgcctgcctccgtgggctgctctggccatgatggggtggggcagattcaggaagggctagtggtgtggggtctgcagggctggctctttccagacttcttcctctcacttcttaaaaccttagctcaccagtgtcttcttgatcagtgcggagctccctgttcttagaagagtttctattcattttcgattatgtctgttcatgaagcccaccctgctatgaagaggaagaatggggtctgggggcctcccattatgcatctgtgcatggatgtattgatatgtatttgtgtgtgtatgtttattagcacattaagccctttttaattttttttttttcttgagacagagtctcgctctgtttcccaggctggagtgcagtggcgcgatcttggctcactgcagcctccacctcccggattcaagcgattctcttgtctcagtctcctgagtagctgggactacgggcatgcaccaccacactcggctaatttttgtatttttagtagagacggagtttcaccgtgttggccaggctggtctcgaactcctgaccttaggtgatccactcacctaggcctcccaaagtgctgggattacaggtgtgagccactgtgtctggccctttttaaaattcattttctctgtgtgtcttaagtgagaaagctacaaagcagcactttgacagaataataccaagctcagtcctgctcttagggccacaatgtacaactccccctgccctgcagctttctttttttttgagacgagtctcgctctgttgcccaggttggagtgcagtggtgcgatctcggctcactgcaagctccgcctcctgggttcacgccattctcctgccttagcctcccaagtagctgggattacagttgcattccaccacacctggctaatttttttttttgtatttttagtagagacagggtttcaccatgttagccaggatggcctcgatctctggacctcgtgatccgcctgccttggcctcccaaagtgctgggattacaggcatgagccaccgcgcccagcgtgccccccagctttctcgtcaaaagttgtaagaagagaagctgtttttatgtgtcatccataaaataacacacatgctaagcaactgtttacacataatctttagagtgtttactctgtgcattggatatgtggacatttgagaaagtaaggggtggtgggggagagagtgggagagggatttgttaaaaggcttcaagcgtctggaggtagtaagctttcctcgcgtttttgttgagccattatgtttttatttgccccatgtgtttttaccagtgactctggcttctctggggagaaacttttcccacagtattttgcacgttttatgtttgaaccgtcccgttgaacagaattcaggtgacttcgcaggttattgctctatctcacctggcagacaaccaacatgtataccggtgacgtcacaggttcactgaagcctgccagaatgtttggaaggggaccaaatgaatacattaattaacttgttaaaagatagggaggcttgcttcagacctgggtacaccttcaagtcagtgaagatcataaaactgatctatttgaagaagctgagcgcactgactgtaaacatttaaagctaaaaacggaacctattgcacaaattgctacaaaccaaaagtgatatcccctgtgagactggactccgtggaggactatatgtctagaaagcaaaattgctttcttttctttactacaatcttgagaattctctctttctccagtccttttcagtgtcttagaaaccgatcagataaaaaaggctgctgaaatgttgaaaattcagcatttcaaagattcatttataataaaatttaaagcatttaaaataaacctagaaataaatttaacagtgaatcttctgttttttcgaagtgtacttttaaacattgaatttagaaaaagatgattttgtgagcaaagccagttctacccccaaaacatttttatattcctgaactgacacggtaaagttagatttgcatgaggtacagaagctaaaaagttgcatttaaaattcagcagagtatatcgtgcagagagtcctggagtgggaattgggagtcctgccaggccacattactgaagccctttctagacctttgttttcttacgtataaatatggaggttgaatttagagatctttaaagttgccttcagccccaagtttcattatagtccctctgttattaaacattgattgatagccctgtactgtgaaggttacaaaggtaaagagagttcctgccctcccaaggcagggattatcctctaattgcaagggtaaaccaattaggcaaagagttgtactataagattgcacagggtgggccactagcagtggcccacgcctgtaatcccagcactttgggaggccgaggcaggtggatcacctgaggtcaggagctcaagaccagccaggctgaccaacatggtgaaaccccatctctactaaaaatacaaaattatctggacgtggtggcacacacctgtaatcccagctacttgggagactgaggcaggagaattgcctgaacctgggaggcagaggttgcagtgagccaagattgcaccattgcactccagcctgggcaacaagagtgaaactctgcctcaaaaaagaaaaaaaaaaaaagattgcacagggtaggtgccataagtggggaagaaataaaatgctgctgagtttagcagggagagagccagcctgcatctaatgggagaatgcaggaagagcttcataaagatggtgacatttcaagatgtatttcaattcttttcatcattttcctttgaaaataagtccatcagtgtttttctgttgctcatgttggcccatgggagttacgtctcttgcctaatgctgccatccagcagtgcctacactcaggtgacatatttgccagtggacctgtcataagagtgcaaggagggaagcctgtaatgttctgcatgtcctgtcgggacccccctcccatgagcctctgaggaagcccgagtccatttctgaaaccaccctcggcacttgcccgcagatacccttcttcacttgctgtgatgccacaggaaaccttaaaaagaagttatttcggggaaacacacccaacaaaaaaactccagtgctaattctgctcttcagtgggtggattattttatgtaccagattcacagtaacagaagtatttcctacaagggaagggactcctgctgcacttggaccaaattaatttagccgggagttaaaaatagcctccgagacttctatcctcatccgtagttctgatgagcaaaaggagacagtgggggagtgggtggcatggccattctcttgacccaccaacctctggccacagggaagagggagggatgagtatttgccccgttgtctgcacctgattagctgggaaaaaatgcgcgacgtaattacaaagaaaatgctcccattttcaccagtgtttggaaggcatgttttcaagggagtcacctgggggcttgtcagctgaatccctaggttgtagttcctacctcccatctttggaactccacttttgaatggcctggacgggcagtagtacatccttttcaaaatccttacccttgccgagttgtcagcctctgagagggtggtgagattgtctcgggaggcagacaacaggccagtggaacccagtcagaataagggagccttttgaggtgggtagaattgtttttggtcaaaaaagaggtgagatgatcaattagagtgattttgttgtgaaacttataaaatgcctctgacatcaagtctgggaacagatctttgtgtattaaccatagagagtgtgtttgaatcattgtataatgtctccggggcacttttatttaatatgcttatttatttatttacttattttgaattttagaggtgagacttgctatgttgcccaggctggacttgaactcctggacataagtgatcctcctgcgtagctggggagacaggcgtgagcagcttcacctggggcatgtttggttttttaaaaattatttacttggaggccaggcgctgtggctcatgcctataatcccagcactttgggaggtcaaggcaggtggatcacctgaggtcaggggtttgagaccagcctggccaacatggtgaaactccatctctactaaaattacaaaatttagccaggcatggtggtgtgtgcctgttctcccggttacttgggaggctgaggcaggagaattgctcaaaccctggaggcggaggttgcagtgagccgacatcgtgccactgcattgcagtctgggcgacacggtgagaccccgtctaaaaaaaaaaaaaattatttacttgggatctggcctaggcaacatagcgagaccctatttcttaaattaaaaaaaaaggtcatattacttaatgatcatatttacacagtgaattctttgtgagagggtcctgtgtgttttctctttgaaagccgagtgcctgatacagggcctggcacaaattagatactcaaaaagtattcgttgaaccaaagagaatgagttggtgaaggtctgataacctaacttgatcaccagtcgtatttatccggtcttgaattacttgaatatttacagctgtgcgtgagacttttactgaactcccttaatacccaagagtagccgtctcatcagcatcattattacggctgatgctgggggtgtgggggaacacacctgatgggcttttctgtttttcccagtaactgtttcaaagtgtagtcttcactatttggaatttagtttaagaagtagtgggtgaggcaatagcttttgactggttgggatcaacaattggtatgatggattccttgtttattttttctgaccgatccaagtgactcagtgatactagacatttcgtgatgtacaaacagccaaattacctgaccctgagaactgttgttggaaatggtgtctggagagcctgctgtaggagtgcaaattctcggaagcccagagttggaagatccacggcacaggatgtgacatctttgtgataccatgtatttagcgtctcttatgtgtctggtgtttttcttgcatttattcattgtatgtaaacattaaatgtttcttgagcatttattgtgtgtgaggtattatgggaggcaaaggttaaaaaacacagttcttgtcttcaaacaacttatccttagtgggaagtcatgtatatgaataaatattactattcaaatagtcacttcagcggataacatacataaatgcactaggtatgcattattgttcccattgtacagatgtgcaaattgaggcttgaggtagttaagtgattctcccgagtgcagtagtaagtggagcactaagctttgaactggacctctcaacttccaaacctgttctttttccacagtaccacgtgactgaacagcaaagctaacttaggggcagttttctgtcagtgaaggttccatttttgtgggtggagtctggggtcattgtgactatgagaaatcttaaaatggtaaaagaaatttggaatcatacaatcctgagacattaacagtaaaaaccttcacaaggcagattagcaacgtgaactagtaaagacaggagcatgtagggctgatgggaccgggtgggagctggcagcagtttggagacttggtttaggtccttctgaagagggtacagagtgggacttttcaggacattgggtttctggaaagatccgtttcaagtgtctacaccctaagctgaaagccagcccagagagctttttggctcatgctggggcttattcctggattctgatgagtcatgttttttagaagctgaacttctaaacttctaagccgagtcccattcagttagctggtaccttcctcaccttggctttgttttctgtttttgctgcttaatacatttccagcaggagatttaggaagggtctgtggacagagaagtagatttcccaggatctaagaaaagaaggttggtttactgtgggtattctagctgtcattataactgtgttattttatttatttacaaagggatcatgagccagaaccaatcataacaatcaaatgaacccactcactgtttcagcctctgatggtggctaagagaaaacagcaagtggggagcaccccccctcacagtcgcctctattatgttgtaccagaagctgggatccagcaccctcaaacgtagaggcttgtactagcaagagtcacatggacagtgggaaggtccattctaattattttgttagtaattcagtctgttctatttattcttataatctagcacattccaaaacatatttgttttgagaatgataaaccaaggggaaaagtcaggttttaagaagaatgtcatggccacgaagataacactgccgttgggcgttgccgtggttctgactgggtgaaggtttcccagtgaccatctttgtgtggaaagagcactctgctcctgatgttggggatgtcatgccacccacgtacatcactgtcctcagcattccagcactcttgcctattctccgtgcatctcttccaccctgcaagccattgcttatgtcaccctgattgatcatggtgtaacacccagctgtcctctgcacacaggatcccaagccagaagtctcaggattttcttggttgtctccatcttttttttgtttcacgcacctaataggtttccaagtgctacgagttctgctttcaactctctttcctctccatctccatagccactgtctttgtgaaggccttgttgtgtgctgtgagttggtcttactgactctggactgtttctcctctatgaactgtctttcatattgccaccccgtggtactccagttgttgttgtttttgttttttaatgtgattatgcactctcttgcttatcatcttccaaggttggtacagagtcactcacagcggcctcactggctgttagctgtggctgctggccagggagtcctaaggtctgccccacattagcttgggagggtagtgcaggttttttacaagggagtggcagttttccaagaaggaacacctcagtgtacacacacttaataggcttcccctggcgctgtgtttcccagtgtttcattggccaaagcccagagtcactgtgaaggtttatgaatcagggttctccagagaaaaggaacgtgtgtgtgtgtgtatgtgtgtgtgtgtgtgtgtgtgtgtgtgtgtaaagagatttaatataagatgttgactcaatgcaattatggaggccggcaagtcccaagatttgcagggtgagctggcaagttggagacccaggagagccaatgggatagcaccagtctgattctgaaggtctgggagccaggagagctgatgatgtaagttccagtccaagctcaaaggcaggcaagcttaagacatcagctctgaagtaagagctgatgttttagattgagtccaagagcaagaaaaagctggtgaccaaatctcaaggccttcaggcaagaagaatcctctcttacttggagggagaggcagtctttttgttccattcaggccttcaacagattggatgagatccacctgcactaggaaggacagtctgctttgctcaacctcccgatctaaatgttagtatcatacaaaaacaccattgtgtaaacacccagaataacgtatgaccaaatgtctgggcacctggggcccagtcaagtcggcacataaaattaactatcacagaagggtgtggaacctgggggtatgagtcactggggccgttagtgtaaccatttgccacaggcagacttgtttgggttataattctttcctgtaaatcttattcatctctgtatccccaatgcctagtatgatctctgacttatagtaggtgatcattaatgtttgttgaaagagcgaatgaatggaaaaaaaaaatgaagtctttgattccctaaagaaaatgaaaataatttcatagacttgagtcaagcttgtccaacccaccttattttgttgtcgtggtggttctgttttgttttgtttgagacttttggcaacctgaagccatgttttttagtttctatctctagtgataagcagaaaagagggatgaggaaggggctttactggcccaacaagaaacagaaactaagaacccatgactgtattctctcccttggacactcctaggagtggaatatctgtgaaatgtttcctgcgattctctcagaatcaataccagccacttcctgattacaagttaccatctttagaaagagaattttgttttcggggggaaaaggttttttgtgttgagggactcttcagtgcttgaagtttaagcctaacgaaattatgcaagatgcccactgaactgtgcctgctgtgtgaccagaatctcttaacctcatgagcattttttggttaaatgttggtaggaaaaactgcttattgaaaggcaaaacttgttttgtcacctgcgtattttagggtgatcatccttgaagtgatggcttatcatgtagagaggtttgtaaccaattgcaattcaaaagggagaaatggagagagctaacagcttaaggaatcaatagcctttgatttctttcccatttgatcactgcctttctgggtatattcctgactttacatagcctgcctttgccaggacagagactgtcttcagaaatcttagagtttactattcttgttcatgagaaattgttatgagattgctgtaggaaagtatgtattttactaattttattatttttttttgagatggggtctcactctgtcgcccaagctggagtgcagtggcccaatcatggctcactgcaacatcaacctccctgggctcaggtaattctcctacctcagcttccctagtagctgggactacaggcgtgcaccaccatgcccggctaattttcgtgttttttgtagagacgggattttgccttgttgcccaggctggtctcgaactccggtactccggtgatctgcccacccctgctccccaaataacgtattttaaaacatacagattataactgctttacaataggtgaggcattttttttcgtgtcataaaacatgcctgtgatgaatgcctttaggaaagcagtacgcctattgctagctttctgcacttccaagtcccaagcctattcctcctcatccctttttcaaggcaggaagctttgtagaatgagcatgggatatcagtgtttaaaacataagaatttcatactcgaaaatgatcttctctgtggaggtgggtgattttaggtttctagatattaagcttgtattatgactcatttgttcttaaacaggttgttctccagttactaaaattaatcacaaaagaccaaggaagcttgaaaaagaaggggagttcatacagcaggtcttaaaattagaaaggcagggctgctctcttttgcatttgctcagtttgaatgatgcaccaggatttaggtaattcatcgtaatcgttgttttttccccattaagaattggtaactgggaataacttaatgtgtaaaactagacggggaagaaaaatggtaggctgaatatttaagaaggaatcacattcctaggtattaaaggggcttgggcttgcggatttgctgctcgctgtcagtttggacacgtgtgctcaaatcaggtcattctctcatatagtgaactttttttttttttttgagatggagtctcgctctgtcacccaggctggagtgcagtggtgtgatcttggctcactgcaacctctgcctcccaggctcaagaaattctcctgcctcagcctcctgagtagctgggattacaggtgcacaccaccacactcggcttatttttgtatttttagtggagacagggtttcaccatattggccagggtggtcttgaactcctgatctcgggtgttctacccccctcagccttccaaagtgctgggattacaggcatgagctactgtacccagctgtcagatagtgaacttctgtccatccggcagccagacaatgagagagtccagcacagtagcgcctctgaagaaatacactgcttgccaaatagcttcctagcttggctcctggtttccattcccatcccctacagtttaccctccacagtagctagtctgatgttttgcaagtgttaatatcaggcagatcaaatcattgtgtcactccatctgaacccttcagtgccctcctcttaaccactggaataaaaaatatgtatacccagcctggccaacatggtgaaaccccgtctctactaaaaatataaaaattaactgggcttgttggcagccacctgtaatctcagctactcaggtggctgaggcaggagaattgcttgaacctgggaggcggatgttgcagtgagccaagatcacaccactgcactcagccttgatgacagagtgagaccctgtctccaacaacaacaaaaaaagtgtgtgtgtgtgtgtgtgtgtgtgtgtgtgtgtatttctttctttcccttggtccacaaggcccatcatgattgtgatctggctcctgcacacctcactgaccagaacatcccaagctcattggcaccccagggctgctgccctgggcggttcctctttgtagaactaatcttcatgatgctcattcgtacgatttcagactccgctgaaatactgcctccttcgagagcctttttagatcataccccccttgttattattatttttgagctggcccaggctggagtgcagtgtcatgaacttggctcactgcaacttccacctcccaggttcgagcaattctcctgcctcagcctcttgagtggctgggattataggcgtgcaccaccatgcccggctaatttttgtatttttagtacagacagggtttcaccatgttggccaggctgatctagaactcctggcctcagttgacctgcctgcctctgcctcccaaagttctgggattgcaggcgtgagccgccgcacctggtccccctcattattttctattactttatgcacttcaaaccccctgtcatcatctaaaaccatacaatttatttgttacttgattattgggtatctttccaccaacttgaaagcaccgtgagagcaggatgttatcttactcttctgtttaacctaaaatggtgcctgatgtgtggtaggtgctcagtgaatatttgttggctggatgagtgaatgcattttagttgcacaagggagatgaaagatcttatagggttttttgtttccttctaacaataaaactaaagggaaatgtcctaagatcaatagagactttttcctttctatgactgtgatgccatgccagtgaagcctgagacctgccgtgtgatcggacatcttccaaataaaaggtgtgttcttcttaatcttaatgtttagaatatgcagcctataaaattaattttaaaataaaatgcatacagtcaatcttatttaactagaatacttaaccacttgattctgaatgttgcccattctggataagtgaagtagatgttgaatttaaaaccttgagaataatttgtatctaataggatcctaaccttgaatattatggctgcatatcgacttgggatcagtgtcctctcttagattgtcctctgcagtcattaatttttttctgctaatattcttggtgagcagtagggtgttgttaagtaaattgatgcatcagtgtgataaaatacatgcagccattaagaatgatgcttataaagacatagaaaaatgcttatatgatgctaggtgcaaaagcttaatataaagttattgccatgattgtcactacagcagagttagtgtaggggaacaggaagtagaagggaacctaaaagatggaaatcatttaattgatttttaaggtgatttgacatagggagattttctttttggatttaatcttgttagaacaatacaattttcaacagttataaaattctgtttacagtagtccccacttatgtgtggtttcagttacttttagtatagtacactaagatattttgagagaccacattcacataacttttattacatacagtatattagtataattgttctattttacaattagttattgttattaatctcttactgtgcctgatttataaattaatctttaacatgggtatgtacatataggaaaaacatagtatatatagggtttggtactagccacggtttcaggcatttactggggtttcttgggatgtaggccctacagataaaagggcgactgtacttgtacctttctctagtctaagccatgtaattctcttgaaatatgacagagcactgtcacctcccagaatgctacatgaatgaaacatacccacccatctgagaactctccttcgcccaacagtgtgatgagaaagttgtctgttgcagatatctacactgctgcatgctaagtgtgtcatcctgggattcaaacgtgagtaatagaaaacctgactaagcagcgacttgaactgaataggaggctcgctctcctcatttaacaaaatgtccagaacagggcagtccaaagctgatacagcagctccatgtttctgtgcgggacccggcctcctccagcgtttagtttagctgtcttgtcttgtaggcttctttctttcattctcatctttgttacccggtaggtgtgagatgcctgcttcattagcatcctacccgtgctccaagcaggaggtgagccaaaggtgaactcaaatcacagatgcttgttaaggccgttcccattcaaagaactcctccagaaacaattccattccagcagtttccatttacatcatcttggccagaaccatatcatgtagccactccgatttggaaaatgttaggtttctggtttatctggatggttttgtttgcttgcttttgttgagcatgtttctacctggaacaaagttaacttagttttgtgataaagaagggatgtggccgggtgcggtggctcacatgcataatcccagcactttgggaggccgaggcgagtggatcactaggtcaggagatcaagaccatcctggctaacatggtgaaaccccatctctactaaaaatgcaaaaaaattagctgggcatggtggcctgcgcctctagtcccagctactcgggaggctgaagcaggagaatcacttgaacctgggaggcggaggttgcagtgagccgaggttgcagtgagccaagattgcgccgctgcactccagcctaggtgacagagcaagactctgtctcaaaaaaaaaaaaaaaaaagaagggaatgaatgttggataggtaactaacagtgaactctgtcgtaaagttgctgaggattgccttaccatgtgtgcacacgtgtgtgtaagtcttttcaatgctcctattgctgtgacttcatctctagtacaggaaggattctgtcacatgacgtcatgacaggttttgagatacagtggaattaactgagtttcttgatctgctgatgacagaaaaaggagacaaggatgaggaagtcttgtgtgagtttttctttttttgcggggggtagggtgtctcactccttttgcccaggcttgagtgcagtggggtggtcacagctcactgcggcctcaattctctgggctcaggtgatcctccccccatcagtctcccaagtagctgggactgcaggagtgcatcaccatacccagctaattttttatatttttagtagagatggggcctcgctatgttgccctggctggtcttgaactcctgggctgaagcaatccgcccacctcggctttgcagagtgttgggattacaggtgtgagtcaccatgcccagcaatgagtttttgtttttgttttttgtttttcttaaacaaggcttttcttttatctttaaacactttgttggttctctctgtttggtagttgtactatgtctaagttgtttattttgttaggagcattttgttgtaatcatgaaatattttgagattcaatacttgtgtttattcagtcataatattcttattatataatacttcctgatagtagatattaggattgattgaagcaaagcatgtgtattaataaactcagtattcattaaagcagcttgggttgcctgtagaaacggcagagcatccccaaggctgagggaggcggggctcctctgtgggtagcagacttcatctgcaggacaatgtgcagcacaggctgcgggtattaaaggagggatcaagaaactggtattaccaggggcacttgggaggataggggatcaggtaagccatagcatagagacccagaaaatgagccaggaatgttcagtgtgaaaaaaagaataaggctgggcgtggtggctcacccctgcaatcccagcactttggaaagccgaggcgggtgaatcacttgaggtcaggggttcgagacgagcctggccagcatggtgagaccccgtctctactaaaaatacaaaaattagccaggcgtgatggtgggtgcctgtaatcccagctacttgggaggttgaggctgcagaatcacttgaacctgggaggcagaggttgcagtgagctgagatcataccactgcactccagcctgggcaacagagcaagactctgtctaaaaaaaaaaagaataagttgcaggacttgatatgagagctgcctttctaggaagaagggtggactcaccttgggaactccatgtgctgacccagaccactgacaaggcgttatcaggggacagcattttatacaaccctgagaacaacctccagtgagtagatgtttccagcaacagaacaaggactgcagaacagggaggctgaggtggcttaacaagaaatgctagctctgatctgggccgaagcagcagtgatggttcccctaggccggaatttgatgcgaggctaggatggatattgggttttctctctggaatagctcagctcctcctgtgccacctggctaatttgtactctttcttcaagaatcggaattggccggtggttcacgcctgtaatcccagcactttgggaagccgaggcgggcggatcacgaggtcaagaaatcgagaccatcctggccaacatggtgaaaccctgtctctgctaaaaatacaaaaattagctgggcgtggtggtgcgcacctgtagtcccagctacttgggaggctgaggcaggagaatcacttgaacctgggaggtagaggttgcagtgagctgagattgggccactacactccagcctggcgacagagtgagagtccatctcaaaaaataaaaaattttcagaattagtatctcaggagattttcctgactactccctgtcccccaatggactcctttcttcccctcctcgcccccaattcagttgtttctcttccacctcctgcgtgcctctttgaagactttcataccacttgttgtaattgttcctctgtgtctgcccatgcactgtggcccttgagggcaaaacctatctttcatctccccgtccctgtcctcagtgcttacacagaatctggcatgtatctggctctcaacaaatatttattgaattagcaagtaaatgaatagagatcagattctgcttgagttaaccttgacgttagacagaatttctgttctaacttttttcacgccaaaaccattcttacaggtttttctgagccaatctgttgtggcctcttagcataatggatagttactgagaaaaaagaattaacaccaagttcttggcgcaagtgccatccagttgaggtgtgcaacttccatgcttgtgacaaggttgaaaattactcatcaagctgtttttgcaaagcagtttctgcttatcagtttacgcatgaaaagtccactctgtgtctgtgttgatgaccataacgtggaccatctaacagctaggatatttaggatggttgtgagtacggctgcaggttcccttttgcttattgaaatagaataaccagagaagaacaaggcaagttttaaaaataacttggtacacatgtaggtgaaataaccttacctcccagtagctgagagaaaaaaaaaagatctcaatgctggctgttgttccaggatatttttagtaagatggccctgtcgtctttgatggtcaatgaaggaataatggcagaaaaaaatattaggcgaggagaaggctacgggcattgtttggtgtttcatttaatttccacctcatccaccagagaaaagcaaacataagcagaggttgatgatgagcacagtagaaaggaaaatgtgatgtgtcttttccttgtagttggttgataatatgtgatttgcttataccacattctgatgggaggtattttcagtctgtggctttgtaagttgaagggcctcctaagaaactcctgtttcgtaagatattctctgtcttaacttttttcaggaaaaaatatgattttttggagttgcttaatagtttttagcttttaaataagtatagtttatttaccacagcatttgaactgtcaggattttactgtgaatgctaccagaaaggtttgttctatttttacgagaatcttcttagggaaattgatgaacctggtaacctaattttagacctcctgaaatttgacagatggatggtatttatagtgttctgaatcggtccctattagacatttaaaaatagtcacatcattagagaatacattcaaaaaagaaaagatttttaacccaaaatctaatgcccagaaaatttttagtctcctaaactgggtgtgcattttggtaacagtttctaaaaagcctttttgtactctcctcattctctttcctgtgtgatgctgctgttgtcatggaaacagatcttggagttgctttgttaataccgtgtaagggactccctgaaatggagagttactgcaggtcattatcatcaacacagagctttaatatcaagtgttgtgctatgatgcgtacactacaaagcacagaaatctgtgtttggaggttacactaaagacatttaaccttgacacccataaacactacacaaacatcagggtcttcagtcatagaacctggaaaagtggaggcaatgggctcatgctatttctattgcagatagtgagctatgtcctggtttggggccgtccgttgttaggtgctccattagggctggcttattgagaaaggaggatttggaagattgttgagtgaatccaggaaaggagcaagccgaaagttcacagggattgttggaaatttccaacaacagtttagatggaaattggctcctgggatgaaaaatggctgtgcatattgtgtttgagtgcttggaggcctctagctagaatgtttttattagcaagtttatagcttgtaagatggtccagtcagatattcatgcaaggcattttatgatgtacgtgattttgttgactggggccttaaggtgggaaacagttggaaggtatagtggactcttgctgccctgggactatctcttgcctccccacttatcagcaaattccataaccttcctggccctcggtttcctcacctttcaattggtgattcttttacaagttatactgggaattaaatggggtggatgatgatacaggatcttgaagcgcctggtgcttggtaagcactaattcctccagcccacactttctttaacatttcctatgccagcagttctcaaaggggcttgccagacctcagcatcagtatcacctgggagctcattagcagatattcacacaccacagatcttctgaagcagcaaggcagcggctggggcctggcattctgcatttcccaagctctccaagtaatgcctatgtttgagaatcacaaccctagactatgtttctggggccaagattaccttggatatggttgagtgcagttctccttaccatgtaagattcctggcaattcccagagctcatacacttcactgttaaaataaggtattggagaaggtggcttttggattcctaagctattggaaggccaggataactggtttgttttgtttgtttgtttgtttgtctgttttggctgaaatgcagtgatctgatcatagctcattatagcctcaggtacatgccatccacactaataattttttttttttttttttttagacagagtcttgctctgtcacccaggctggagtgcaatagtgtgatctcagctcgccgcaacctcctgggttcaagcaattctcctgcctcagtcttccaagtagctgggattacgggtgcctaccaccatgcccggctaatttttgtacttttagtagagatgaggtttcgccatgttggccaggctggtctcaaactcctgacctcaggtgatccacccgcctcggcctcccaaagtgctgtgattacaggtgtgagccaccatgcccagcccaccgtgctaatttttaaatcttttatagagtcagggtcttgctatgttgcccaggctggtctcaaaactcctggcctcaagcaatcctgcctcagcctcccagagtgctgggattacaggtgtgagccacttcaaagaacagaataactttgaatgcacagtttgtatttgtcttgctatcaaaaggcacgttaagttcaacttatcaaaggtaatgcagttagcaaccatttttcccctaaatttcaggtatccagatttattatttagaattatactttctccttgggctaaggaaacagttggccacacttttctactctatattcttcattcctattccaatgtgactgctgatttctgacttttaaaacctaaaagatttcttcctaaacttatcaggaaaagtaaaatgactccagtaccacttgccactgctattttagagacagtgaaattctctgaggtctgtcattcctgattttattgctttataaaagcctgctatagaatgttttttaaaaatacaatgatttaaaagtctccatgccagggcagcactggcaaatgaggaggcaggaggtcttcatgtaggagatgcttcggggacagtgtggcttgtggcagcctcaggactctgggcatctgtccactcagtacaaaccaaactgcagctccaactaattttgatttggaaattgcccccttaaaaaaaaaaagtactaaaaatgtttgacatttaccagatttctgcagcagtctgcagtttctcttgcaagtatattcacagacagtgaaaggaagtatttggcaattgctaactcatgtttttatatagtgtagaagtccaaagatggtaataatgtcatattatagtgatggcgatctatagtgtaaagtataatgaccataaaagagttctcatttttatagtttttaaacatgatttcagcatccagaggcaaactcctatgtaaggataatggtcgtgcatggccacagagattttttttctttaattctcaattgcttttcacgcttaactttttctaataagtactatctcccaagattccagaagatggtacaaatgagaaaataaggtttatcttttctctaagaaagactaaactgtgactttttttttcctttctggctaattaggacaacaaaagtaaacatccaattatgcagtgatgaatcaagtcatctggctggagctggattctttagtgtgttaagttacagtaaatattgaaaagaaggactttatgcagtaggactgttttcaagaaaaagaagaccagtctcagccaaattcaaatatcttgtagagaataaatgcctcttgggtttatggatttatgccatatgtgtgagaagagaaaatacggtcaagaattgttgtatttcttgactccttgaaaggcaagaacactggcttgggaaatagggacacctggtttctagtgttagataaatcttcagaatacagaatgctctttgaaataacaaaatacttgagtgaaggaaagaattgaggaatgaacttaaatttagctctgaaagaattctttcttcagtctgtggttcccttagctactattcaatctctcatttccatcttagccatattttagcttccaccctgtatgacagagacaggggtctttctcttggtttggagcacacatccctcaacatgtccagtagggagctcctgggcgacgggtcctgcaggtggatgtggaccaggagccccgtgggaggaacgtgcccctggggagagctggtggataccccgaatggcaggccacctggggcaaagccagtggaacctgactatggcaggatgagaacaccagtgttttataatgcccacttttttttcacttcttgcagtttctatgtttatttcctgttagcatttagtagtatctttatgagtttatctcagttatgctaggcagaaaggagctcttgtcagttggcaggaccgaaaggagagaataggcagggggaagaggggacagtaatcgaagtaggagcaccttgagcgaagtgaaatgtgggatggaaatggaagctcctgtttgtgatctcccagagaggctcagtccagcgccaggtgccgtgtgcttgtggaataaagagaccgaattccttctgtactgggggttcatgctgaaccccacctttgttgaaggggaggaaccagctgcccaaggcaaactagaagcatgcttgcaggagggaaggttaagacacacagtttatgtgcatagcagtgaaaaccatagtgtctgttctgaagtttgggaaaatagtgtgagactgtctagctgggtctgtcattggctgatgtgtagtatgtgtgggtcgctcactaaaaaaaaaaaaaagaagaagccaggccccaaaggaagagggcattattcataatgaaacctactatgaatccagtggggtcttgatttctgcttcttcctgggctgtgccaccaggacttccttgatagacctttggtgtcatcatgaattctgttactgatcccggaataaagatttggtgccctccggtttccaacagtatccagagatggccagggaggatttggatgggaaggattaaagtttgtatacaggagagaagacagtactctctgaagtgtgtgtggcctgagtcacctggtagaggtgggcttgggtcaggttctggtcacactgtcattctggctgcagaagaagaagcaagatgagtcaatcagtgtaggatttcagagtgtggggcactgacttcccaaatttggctgcacatctgaatcacctgggatactttccaaaatgcattcccccagttcctccccgaaattcaggcaggtcattcttaggaaaaactgggagttaaaaagcacaaactttggagtcaaatagcacttgggttgaatctcagcatcaacatcttttattggttgtatgaccttgagcagggcatttaacctctccagaccacagtttgtctgtgggcagaagacaaacaatcctacttatttatagagttttgggatgaattagatgaaataatgcatttaaaatgcctagctctttgcccagcatatagtaatcattcagtaaatattagcttatgtttaaccaaaatgtgtatgtcagatccctgcttagtactgtgggaacatgcaaaagaattagaaaaatcatgctcccttccctgaatatggctgagaaaaagcgaatgcacctgactatttggtgagttccggcaggaggaggggacattgtaatgaagctcagattgccggaagatgctggaaggatgcactttggacctaaggcaggtccagggtggtgcctggtggacatgaagaaggcagcaactttcagagcgagcgtcagaggggcttgtaatgaacagaattgccttctgatgatgtcaacatatctaatacaagactctgactaattactatttatagttgcttatattcaaaagcttgtttatgctgcaagtaaggctgaaaactgtcagcagggtgtagtggaaagagctcagagctgagtctgaactcctcaatttttatcccatctgtgctgctgactagctgggtgacatcagacaagcctcgcaactcccaggcctcagcctctgcaacatatacagggtgtgtgtgagtgggaggagatgggggattagacaactgctagggtcttctggctccaacattcaacaaaaacatttactgcacttctttcccaaaacttactgtgtgccctgattttcaattcctgatactctgtaaggggcattgttcagtggaagactgtgtgttttgctaatttgttgcttgcgattcagattcctttaaagttagcaaagagcatttttgttacattggaacaatataggaagtatccttcattatgctttcatttgtttttgagtcacaagaaactgttactgttgttttgggagactgatgtgggaatgtcttagcacatcatttctctactctaattttaaatacgggtagtccctgacttataaacagttgacttgagatgacccatatgtacagttagtactatcttagatgtgagaatccagttctcatctcctactgcagagctcttctgtaatttttcaatcagaacacctaggagatgtctattcttctcatttcacagatcttcactgcttgccttttatgggccaggttctcttctgtgccctgggtatccagcagtgaactaagcagacaaatctctgtgctcacagagcttaggttacagtgccattggcctggaaggtacgcttgcctattgccccaggtgaggaggagtctgtgacaggtatctgggtctgtcttcctctatccaagatcacttcccccacctcttccctgcaaggagactaaatcataaaaccacaatgcctttttatgtagaaacaatagaatatgtgactgctaggtatatgtagtatattgcaaagaatagccacagatcctcccatcctggttacatgttctcttataacgtgtctttgccatgctttcagtcagatgtctatttctctactcctgtgagtcaagtggctttgtgacttcctttgaccagcagaatgcagtgcagttgacatcatgggagttctgagctgaggtattaagagacctcacatatcccactcctgcttcttcactcagaacttctgcagccacagaagttctgattaccctcctggaggatgagagaccacgtggagcagaaatgagtgtaaaacaaaccagcaccattgagttaggccatcaggcacctgcagctgcatgagctttcaccagcttaaagtctcaagatgctcaccatcagcatcatatttttttgttactaataattgaaagatgtaaatatttatgaacttaatatagatattaatatatttcctatttgtcatgaatgaaataggccctggaaggttggcattggaaaatgcctttcacattttggaccatccacttagagacacatttttggaaaagaaccacttgaaatctggtgcccagctgtacacgtgttttgtggagagagacagattagcgctggcacgtgtgagacagtggttagtgaagggtggaagatcgccagggctcatggacctgcttcagatggatgtaaatagttggagtgtactggaaaggtatgggactaacatgaccctgaccagagtttggacaagtgtggtttcattctgggggactgacacttatttctttcctagaagtgttgatgaaagtcatgactcagtaatatcagaagtgtgggaccaaagtggaaaataaactcctgacttcatgaattaaacagaaacatgtcagggccactccatactcttcttcctgtcttccaaaagtctctttttttttcaattcagaagaaggtctgggaacattctgtgcacataattattttataaacaatattttatttaatgcccttgctaataatacttcctataaataaacaataagagtcgtcatggttccagattgcctttatgataatgatataccatatgtttaaagaaatggtctaaaagacatactgctgtgattgaaacatttttggaaattgtgtatgctaactgtatattgctctacagaaatctgttttgatcagtggataaaagcagctacacataactatgaggaaatcttgagaacatttattagtaattaaatatatagctgaaatatgtgcctatatgtatatccgaaaattattataggagatggttttcagtgaagatgattgggtggctttgaaataaataagtggtttggtttatgattaatggatttattaatttgctatggtcacctaacaatccaccccacaagttggtggctttacaacaacaatcatgttatcgcttccagtcatgttatcacttgcagacataatctgcatgtcacctgagggttggctgatttcacctgtgctcagctaggcatctcggcctctcattgtgaggctgtgaatggactctgcgccgtacctcttctccaattctgacctggggcagctagcttgggtgtgctcttcccagggctaagggggcaaggcaaacccaggaggatgggcagaaacactaagtctggttcattctaggcttggtaggggcatgtcgttacttctgtctcattatgttggccaaagtgagtcacatggctaagctcaaagttaggaagcagggaaatagactgtatctttaggggaggaatttcaaagtcatatgaaaaaaaaggtatggatactacagccagggatgaacatttggagccagtaatgatattcacccctgtgtctgtgtgactcctaagaagagccaagacttgttaaagatgagcagagaggtaaattagtttggagatggtgaagaagcagtttggggatactttggtctgcgtataacattgaagacacctgtctttccttgtataccaggggttgcaaactatagcttattgggccacatcctgcccaaggcttgttttattggaacacagccatgtccagtggtttgtgtgtgtcttgtgtgcagctgctcagccctgccacagacagttgaatacttgaggcagagactgagtggcctgcagagttgaaaacattgactaccgggttctttgcaggtaaagttagctgactcctgtttgatatgatgcaactggatagaatccatttggctataatctccgcctctctacctgcccaccccatacccgccccagttccttttaggattttcctactgtgctttgcattctcattattctgtgtttttataaaataggtaaaataggaggtaaagttatcctggtgcctggctgttggcactgatgaccaatgcaatttgcatccacaggtcataatccttaaagtttataaggcgacaaattgcagattagaggacatacaaatgagggagccagttgctacttttgcctttattattaatgttttgtggctctgcgggtcattcatgatgttagacaatagggtgattatttctgttctgctgaaagacaatctgattgtgttttgtgtagaatgaggcactgatccgctctgcctgcctcccatgagaaatgccgcagacctttgtctgctcaaacctcctcccgtcagctctggtattgtgatggaagtaattgaccaggcctcatgggtcagcatatatctgtactgctgtttattcttctttctactttttaaggactaaaatcactttcttgtaaaatattacaaagacattttaaaagaaaagactgtccattgtatttttccacccccttaaaatatattcataatgatctttttaactgggtgggacttgatttggtttaaaaacaataatcttggtgactgtatggaaatacggaaaatgtttaatacagtattccattaaaaacatgatacaggttgggcgcggtagctcacgcctgaaatcccagcactttgggaggtcaaggcgggcggatcacttgaggtctggagttcgagactagcctggccaacatggtgagatggtgagaccccgtctctactaaaaatacaagaattagccaggcgtggtggctactgtaagcccaggcatctgtaagcccagctactcaggaggctgaggcaggagaattgcttgaacccgggaggcagaggttgcagtgagctgacatggcaccactgcactccagcctgggtgacagagcaaacgaaactctgtctcaaaaaaaaaaaaaaaaaaaaaaagatgcataattgctgcaggtatgtgattgtaaccatagaataagtaggtatgtacatgtggtagatagaatgatgtgccttccccctgaagatatccatgtcctaatatccagaccctgtgagtgtttttcctacatggaaaagagcataatgcagatgtgattaagttaagggtctcgtgagagattaccctgggttatctgggtaggcccagtgtaatcacaaaggaccttctaagagtgagggatgaactcacaaaaggatgcagaagcagagttgggagggttgcccttcaaacatggaggaaggggccatgaaccaaggaatacaggtgacctcttaatactggaaaaggcaaggaagcaggggcccccggaactctgcgagcacctccattgtagccttatgagactcattttggaagtctgaccccaaaactgtgagataataaatttgtgttgctttaagtcactaagtttgtggtattatgttacagcagcaatgaaaaactaatatggcacataagactggaagggaagatattttaaaatgatagttggaagtacagtgtattttagtttgtgtattttgattgggtgcttgtgagtttactttggttggttaagactaagaggcaacagatgacttttaaatgttagaggagggaaaaatggtagagtttcaagttcacattcaagtacaaatgatgaataagcccagccaaattgttctccagtttgggttttgatgtattgggttcaaatggttccagccttaatggagaagccagtttcttttttcttgttgttttattgtttttaagcctctctctggttttcagtagagtttgaccttaaatatcatctttgattactattggtgtccttgtagttaaggtctttgcaaaagtttgagtgcaagttttaagctaaaaacacgtttttaaactttcacaaattttgtaagatgacaatagcattctgtaacatagacattatggtaatagtgattttctctccatccctattttgtccagcgatttccaagttataagacgtgaataagactaaccgctcacttccaccagcagctgacctggtgggcttttgagttcaaagagtcatttcttcatcttacctccagcactgcagggccgtgtgaccttgcagagccttgtttctcattgatgaaaggagctcatgcctcatgaagccactggtaagggccatggagctcacgggccatcaagcttccttcccatcacttgtgggtggaattgacattacccgatgagctcttcctggggtcacctgggagggagtggcccatgggtggtatgacaaaatctcatagtcagtctttgcagttttctccacaggtaaaatgagattttggaaaattttcatttgtttgtatttgtcccaaggtgagtcttacatattttgagcaacaaaacgaagatcattatgaaaatgtccttatggaagcactctagggccattgctcatttttatgagtcctcgtgctaagtccctgagtactgtggctcatgtcttagctggctaaatcacagtcaaaattctcttcttaagcctcaaaataagctgctgattatactgcctgttggccagactaatcaaatacatttgatgtttcagctgactccagatacttttccttcctcctccttggttctttaactgtcatcccagatctgcgacatgcaataaggaaaactgagtcagggaggaagtaggattccttttgctgctaggaaccacgttagctttggattgtccatagaatgcacccttaacagttcttggaaaatggatgatatttggttcctgccccatgttcagtgttctttggcagctgcaaagcatatcctagctagaatccttatcgtcttgaagttcatcaaagattttgaacagtcatggtggagatacaacctaagtacattcatgcccattgagacaatcctttggtttgagcgacggaaggaggaataaacacatgaatgtattttattgaatcccagagaccctgaaacaccaagactcattaatatatgcatacatggatggcagaataataaacctcacctgacctgtcagtgtactctcagtttttaaggttctcccaaaacagggaaactgaaaaatacttgggcagaaagaaaatatcatcaaataacacctatttcttttcagctatagagatggctggatatcaaaagcaccacgggagctttgcaatttgctgcctcttttcagccctcagcttgactctcagttttcaagagggagaaaatgaatgtttcccagcattctctgtcctttgctccaaagaagagagcaggtgttggcttccaaaccttccgtattttcttattgctgttagggggatcaactgcatgtttcctgagggaaaagggtggctcactgacctacttgaaggcattctctcagtggaagctgggcaagagaatccagggatttcttttgcaggtttctgcgcagtgcccctgccatcaagctgcctaaaatgtgaatattgcttccctgcgtttcagaggtggtaatattggggcaagtggtggaggatctaaaaaaaaaatcatctttgtgctccctaccttgcccctggtatggattaaacagccaccaccctccttctcttataccctgggggcctcctgacaatacttccaattgctccattgattacttagattttttgggacacaagggcccacgttgtgtcttcctgacaacacttttagttgctctattgattacttagatttttgttggcaattaggagcttttcagtaacattctttgctccatcggtagtctctgctggctcttgttcactcaggaaacacctgagcacagggcttcaggaaagccttctattaaatgggcagaggccccagcaggactcctgcatgttcatctgcacagccagagacagctggagggcaggaggagccgcgttcacatagggttctgcagccttggagccgccgtttcttccaagtactcttcagatcagtggttcttagccctgcctgaactgcagagtcctccgaggagctttcaaatgaagcatggcagcctgggcaggttgcaggtccattaaatccacatctccggggtgggagccggtggcatccttgctttgccagaactcccccattgaccctaatgtgaaacctgggctgagaggccctgcctaaagctcgattattttcacctgtggatgtaggcgatcgcttccttttgtggctgttgtcaggaggcagaaaatcccctgggttgttggctccctggagtcttatttttacagagtgccctgtttcaggtgcagcaacctgactgatgtttttacaaatcaccttttggtggcctcctgtcactgctgtctcccttcaagggttaaataagcctctctcacccattccttttcacacctgtgtcgtgtattattggcaggcctcagtcctcagggtgtcaaatggaactgatggatgccagacattgtggatatctgcaagtcctggttggtgaccagggacttgaagagtagactttcttctcaaacttatctttgtgctgttttccttccccagacctcatagtctggagcccatgtttccaggggtggaatttgattttcccagagaggagctgtgttcggcttctaggctgaggagctaagctgccgagcctctgccagccctctgtggattcgctcctgcattattcagcgcctttgctgacagagcaccatgttccactgctgagcagatcagggtgaatttccaagagggaacattgcagatggttttgcctttagggatggattttcttactcccaagtgactcacttctggtaaaattaaaaaaaaaaaaaagaacaaccttgagtcccttgagtctgtccccaccatctttgctcagagggaattaaggagccaattcagagctttaaaaaagtcacgtgatgattcattatctttttgctggttgtttcctgccccctccccccccacccccacccactgacttgtagtttttcataagcatttattcatccttgaattttattttatttttttatttttttttgagacagagtcttgctctgtcacccagggtggagtgcagtggtgcgatcttggctcactgcagcttccgcctcccgggtttgagcaattcttgtgcttccacctcctgaggagctgggattacaagcatgcaccaccatgcccgactaatttttgtatttttagtagatacagagttcatagccaggctggtcttgaactcctgacctcaggtgatccgcccacctcggcctcccagaatgctaggattacaggtgtgagccactgcgcccggcccatccttgaagtttaactgcaaccccatctccttccctctttgcatggggtaaaaccctactgcaaggactcactagaattccttccactcacatcccctctgatgatctggccttgctgtcaattgctgtgaccatggacaagttgccttgctgcctctcctgaacatgggaggtacacaaggcctttcttcaggggtttattcccagcagctgatctgctgctgtcggtggaattagtttgcacacacagcatcccggggagtggaacagtgctttcttagcacaaaacagacacgtttgcttcccttctttcagtgaaggggaacccacggctggaaaatactggaaggcaattgtaaccttaggcagccaacaacacttcagtcctttggaagtggattttaaggaagaggagacttcaaacggtagagctctttgtgatgtacctcttagagaatacctttttgattcctacacttattctcctctcaccaagtgatacttaaagggatgccctaaaacagcagtaaagtcataggcccctttttataaatttcatgaattcactacttttttcccatcacgtcttctcttaaccaatgtatctgcatttggtttgcgtaaaagaagaaatgtttcctctgctcctgggctcaccattaattctgatgagataggcctttctcctctaaaggcaacagggcattggccaaatcccctgttttactgcatccctttttggagctcagtattggcctgtcctgacccccctggtttgcctcagaataattattaagggcatgtgtcttgaaacaagtcgcacccaaggctgctagcctgtgtattgactgcttgatttataacgaatgctgaatttggctaggcaaatgagaaacgtggtagggtcagccttctgcctcctcctggtttacagactcatcttgcccattcatttttcccatctaaggctttaatttgatacccagtgggttggtcttaagcaaccaggcaagatccagaggagactgtccaggctgccgcccccactggccaggcagaccccgttccttttgcgagtttcctgcaaggctgttgttgactcgggggagcggcttttagttgctcaggcttctttctgctgctgcagaggaatgtgttcccctgtagaggctgttggaaagggcagtgcagacaagccggcttctcaggcatttaaacaagttgtctggaggttgtcagactctgcagcgcatcagcccctccttttgttcgttcgtaatgccacagtgtttatggagccctgccttttggaggagtgggaagtggagcttccaactgttagcctatgtgtttctgtcatttagaggcaataagaagaacatgaccttttctggaactgctgccccccgcaccccccccaaaaaaattagaaaatggttagttttgattacattcaccttgaccactttcttcccaagtgaagctgaccacgattctttgttggagccaagtttttgtatttgcatattcccctcgggtaggaactgggtcagttattattgttctaactagcaggcggaattggggtctctgaggcatgagggagattccattgtcttctgtgtattctgctggtatttcatatctgatgaaggtcgattcttatccctaattgacttcctcttgggttttgtagtctgagtatttgaaatcacatgttgattgggctgggtgtggtagcacaagcttgtaatcccagcactttgggaggccgaggtgggcggatcacgaggtcaagagatcaagaccatcctggctaacatggtgaaaccccatctctactaaaaatacaaaaaattagccgggcgtggtggcgggcgcctgtagtcccagctactcgggaggctgaggcaggagaatggcgtgaacccgggaggcggagcttgcagtgagccgagatcacgccactgcactccagcctgggtgacagagcaagactctgtctcaaaaaagaaaagaaaaagaaatcacaagttgatctttctgaatgttggggcccaatgtatttgagtaataaacttgtaacatgagggaaatggacaagtgaaccttcttaaggactcatggtaatttgactctctcctgtatgattctttactgacagtgacatgaaggggaattgcctggggtagacttaggctgtctagtgtcatatgctgcttttattaatccggagatttctgattggaatatatttccatttcaatgggattagagtataaagaatgctttgttacaattatttacttacaccgccaccaccgtaagtaataatagtagttagcatttaccctgtgtgtgttacctataaggtgctgttctcagcacttcatgtgaattattcctcaaattatccccaaactctctgagactgcgctgttaccattttgctttgtagctaaagaaacagcttagagaggttgagtaactcctccaaggcatactcagcagtaggcaggacttgaacctgcgttgtgatttgtgaattcccacttttaaccacccttcactgcccatctacactgcctcttgcacatctcatattttgccagatgggaaaactcaccaaggatgaagcttccttaagatctttttgagtataaataggccatctgttgatctgtgtgtccatcaggttaggggctcttacctcaagccaacatatggcagaaaagatatgtattgatgtcttgtgggatagttaataaaacacaaatgtgcagtgcagcttctttaacctgctccatcttggacccaaattcccccacccctgctgccaaacaggcctctaactgatggggtgggtgtccccatcagctctgtgctggcccagcttccttggggttggccctcaccagagtaagggcacaaaacacagctctcgaggggttctgcagacgaccagagcctgagaccttttcttggcagctggtgtcagttccctgttggatctgtccttcccttctgaatcctagtgggatctcctcactacctggtcactatctctgttctcacaacaagatttaaacaattataggatatcagtgcactgtgagaccacaaactcttctagtccattcccctccttctaatgaggggcccccacagctgtggggttgtatcatctaagccagacctccagtttccttttcactaaaatacctacctttgaaataaaagtgaaaacttacatcaaaacagcatcatgcctggaacatactgaatggacagcatttcctttctttcccctccttattctcctgattattaattatttgcctgactttggatagctattggcttctgtcctctgatattaatgtactcataatttctgtttcttacctggttttggactaattgctctatttttatttttattttttggcacatgctctgcctctccaattctgacatttcttgcagtcctctcagcatatttctgatcacagtcccaaatgacattgagaagccctgataggaaaatgctgtgtaagaaatatgagttatttgtctgtgtgactagaactttcctggtgtaagttcagaactttccagaacttccctgaactttactctgtccggttcagaccatctgaatgcagatgtctgacttggggatagatcctccactgatcaatcattcagagaaaagccacagaaaacacacaagattagaaaaataaaacccacatggaaaggctttagtgaggttacagcatagattatgcagtctgggaaaagaaggataatgcagattaaaatatctgaaatattagaatagcataaatgtagttaacttcggagccggaagaccagggttgaatcttggcttcttcccttactggccatgtaaccttgggcttcttgcttaacccctctgagctgcagaaggggggatgctgctgttgatgtcatcatcaccaatggcagcagtagaagctatcaatgatggtggttatcacttttattaccattgtttttagtaaggagagctaacgagacaggctccaactgctcttctcccgtgggaattgcagttttctgcagtggatcctgtgacagattcctgtggattcctgggacagacttagccacctgtcctttcttctatcctcctgtactcatcagattgagcaccatgtgggtccagtccctgagatgagtgcttgatagatagaggtgaacgatgggggcttggtcttacagagctgacctgtaaaatcctctccaccatatccagtgcatacagctgggcattctttgtgtagatcaccccagttattagaacctctatttcagtaattcactctctgggctctagttcttccttgtgaattttactctcagggaagccccgactgtgctcctgaagctgtttttatttgtagtaatttagcatgcgtccaggaattgaggactcttgcctacccaaaatcagaggtggggaggaaaaccacggtatttcagtccttttgttctttttgaggtctgtaattcaccaaagccaggtccaccaaagtaaattattaccataatttatggtgagaattatttggggccacagatgtcaagtggaagcttgcaggtaagtatgattgagaaagtacaaaattttgaaatgaactctaaccttatgagtctgttgctctaaggatctaaggatattaggaggtagtgttaagaatcacaactgcattgttaaacgccaagtgttctttgtgatttgattgaaactgtagttgggattcttcaggttccatatgtggggcaacatttaaatattaacattcttgggaagattttgtatagacagctttctctgtcatccgaatgccgtgtggtcttcagagcatgtcataagaaaagtcatgagacacaaatctgatggaactttctttagcatatgtttaagacttgtcatcttcccatctcatctttgcagtagaaaaataccaacgtttccctgaacaaaatagaagtattttccacttccccatttctgaagctcctagacgttttatatttcttttgagtaagagattgctttgtatccaggagcctttgcatggtgccttttcttttactggtttgtttatttgggagatggagtcttgctctgtcacccaggctggagtgcattggcatgatctcggctcactgcaatctccacctcctgggtttaaggggttctcgtgcctcagcttcccgagtggctgggattacaggttcacgccaccatgcccagctaattttttgtatttttagtagagacagggttttaccatgttgcctaagctggtctcctgagctcaggcaatctgcccgcctctgcctcccaaactgctagaattacaggcgtgagccaccaccacgcctgactccttttctttttcttgatgttactgaagactttattttggaagtagtgagggcccagagctgatcccttctggagatgtgtcacagggtaaagaatgtggctttgaaactccaactctgtcacttaaagctgtgcctctttcagagttacttaaccactctgaaccttagtttcctcttctgcaaaatgggagactagcaacctgccacccaactgactgctctgggctatttatgagacagtctctgctctcgggagacatccctctttggcttattcatcctcactcatctgcgttggagagatgcacttggtgcctctcctgcagaaggggtgttaggaggctgttgcgtttgtcaccagggaggtgatgttttccccattgggaaccctaggccagcaaacttcgagaagtgtctgtggcagcttgaatgctgctatttaagagttgataaagaggcagcttggagaaaacctcaagcttatttggttgagtggggtggctgtgtgagaattaagtaatgagtagacctgaagcatctggtgggatctccagcagttagtaaatggcagctgtttttattctcatcccttgtgggcagtactgtccagttccagtgatgggcattagtggcatttgggatttgaggataaccttcataggttggaatgagtaccgtagcaaaacagaattctgctcttagccagaaagcattccagttagcaaactacctgacagtgtaatgtgcccagaggacccaggagggccatcccagggagaacagcatcgccatttctgctgaccacatgctgtctcctgagccccggtatctgaggccctcatcgaaggcataggcatattaacagttatgctgccagacttttatcagcagtctgtacttctccttttatcttcggaactgtgatgaaaagaacagtccactcccttctgatctcaacacttaccaaagctcatctgttcacaggcaaatgtactaaaacattttttattggagactgagtttcatgtgtagacatcattgtatttctgtgtggtgtcctcagattttcactcttgttttttccccagctgccttttttaaaaactcctttgcactcttaaacgtcaggctgagtgtatgtgtgtaaataaacgctttgggtggaggatattgttctgctgtgacaagccatcaagcagcacagcaagaaacaatacttttctaatttgtgagttattcttacgtttcccttttgcaaggctagttatttcattaaattcatttaatttaagctttgaaatcttttttttttttttgagatggagtcttgctctgtcctccaggctggattgcagtggcgtgatctcggctcactgcaagctccgcctctcaggttcacgccattctcctgcctcagcctcctgagtagctgggactacaggcgcccgccaccacatccagctaatttttttttatttttagtagagatggggtttcactgtgttagccaggatagtctcgatcacctgatttgtgatctgcccgccttggcctcccaaagttctgggattacaggcgtaagcaccgcgcccggcctaaggtttcaatcttaataagaatggctaacttttagatgagagttttacatcagaaaacctcatcgtacccagagagatgcttctttaattcagatttgaagggatgagtttccttgttctggattaaacagctcactcagacacaccaaatgaatgcagtgtgcagtcctaggtggcaccaatcacagaagagtgaaaagcataaaacagttttagaaaaggtcaccacacttagaaatagaaatccacccttgctcacgcaacccgagggatttgaaaataatttcgaaaatcaatttaaacatgtaggccacccgtcttttggagagatgcagttggtgcctctcctgcagaaggggtgttaggaggctgttgtgtttgttgccagggaggtgatgttttccccattgggaaccctaggccagcaaacttcgggaagtgtctgtggcagcttgaatgctgctatttcagagctgatgaagaggcagcttggagaaaacctcaaaaataaatactctgattcatcattgttgttcaggctttccagccgtcagagccagcccagggttctgagacaaagggtaacattcagcacagagcccagcggagagtctggagccctgactgtctctaaaagagggggcggagagggaggcagctgcctgcaaaccctggagtggggcttgacgctggggggacggcgtgtgctggttttgctgctttgggggtgaggagaggatgaataatccaaagagggacgtctcccgagagcagggaccatctcataaatagcccagagcagtcagttgggtggcgggctgccgtgcgggggctgcagttagaagcagcactcggagtggagtggggcctcccagcggggccctgctgcactttgtgagtgctctgtggtcgaaggccagctgggcctgaaggcaaaacatctggattttgcagagggttcctaggctgagacggaattcaggctgtaggctctgtgagaccttgtgtgaaacccccggttctgtctctgtcacttgtttgagtctcccatttctctgtctatcaaaagattgaatatggtggcttacaacagaggcagtcgagggtaattattagtatcatggtttgacctcgagatctggcacttcctggacctattccgttgtatatttctctgtgcactccctgagcctcccttttctcagctgagaaaatggtcacacctatggtatcccacactgtggaaaatgaccaaataagacaaggtatgtgcaagtatttggtagaaccctacagaggtaggaagtggctgttactagctgtttccactggtattctctggccatctcagagctgtttagggaccattccagctacaggggagggcaagatttagagtagactctcaaatgagtctatctgattctttggaagcacgagctctagtaagatagtttgaacaaagatgtgaccatgaggggttttgttttattttttaactagattttgatatgttgtgtgccgcttctccactgcacagattgaccaagagttagctgcagattgtggctcagtaagaaggtcttgtggtacgtgctcctgcggcccccacctcaaactcttgcctctggtgttcttgaaagaaatgaggggacctttgcccgagccaagggaaaatgcaagattttggaggcttagcccctttattgtttttttcctctgttgcttatattgatttctgcggcaaagagcagttgactgggattgaaagctactctgctggtcttggatgtggaagaaaaaataattcccactttccaaatagaggctcatccagaggcagcagatgccagaggcagcagatgctagctgcagttctgcaggcaggaattgcacgtgcaaagcagagctgacgtccagtccacgcctcatggcactttggaagtgcatctgacaccgtttgcctgccatacacaagccacaaagactttttgaggcgacaggttatgccaaaaattaagtaaaaatgacacagcttcagatgacatttacatatctatttttgaggtttcagaacatgtgccctataaaaatgtacaactgcattgtttaaaactcttctgagtctctgaggattttctatcagtgcatgcctctcagttatcacttaaatgtcaaggccctaagcttgtatgagcccctaaaatgtttttgagccccacagtaaatttttggctgaccacatttgttctatgtaaggctgataacaagccaccacgtggaatctcacagtgggactttagtatcaggcaattgcagagtcctgaagctcgtgttgcggttattatggttctatataaagccccaggggagaaagtcatttcatgcttttaaaattactagttaatgtttaaggagtttatacggagtggactgagccaagcattttccccttaactttaaaattattacagagaggccttaagaaactgttctgtattagatggtgattaaaatatgacctttttctttctttatgcttaggattttcacgatgtggtttgcaattaatttgtatgtgcacagtctttgtgctagtttctgtggacatacagtggtgctacttggccttaagagcttcctgtgtgtggttgggagataggcagttagtaagccatgtgtgctgtgagaaaacccagagcatagaagtcgcacatgagagtaccaggtgctgagtaccatgggggtgagagcaaggagggattatttctgccccaagaaggcttcttgggaaatagagcagttatgaaggacctggaaagatgttccaataagacttgggtgaggagacacaatagtcccaagtagggagggcagagcaccctgagtagaggtgtggtgtcaggaagtgtgagaattcttcagagactgatagtcggaagggattcctctgcaaaggcctgtggaaggatatgaaggttggaaagacaagtgggagccattggggagtctcaacaaatgtgtattgtattgtgtgtgtttcacttggaaaattatcttgctattaatgagaaagtacagattaatgctttttttgttttactggattcaaattatatttgacaagtcatttcattctagtgtatgcatgtgattttcttggaacgagggtaacattttaaagataggatttgatgagtcaatgaggtatttttcaagtagattacttagaaaatgttatagtcataaaatatcttggagttacagttaagagtcaattattgtttcatctataggcatccaattaaagttgaattatgctgttattttcactcaatttccaaagctatgcacttccgtaatttctatccttgtttatagtcagtataatgtttaatgcaatgtgcctgatttagcactttgtgttataaattttgcctgataaataatcaacttattttcttccgtatgacgacagttttcttcacagtgaatggagcttagtgtatttatataaaatgtaagtctgggagagtttccattatagttcaagtatatttaatgttcaaaagaatgcagtatttgtggtttcctggcattctttgaataccatgtggctcttctctcttccttctcaccaaaaccctagtcattttattatttatataatgagatactgtaagatactaaaacataagttattgtgaggtctggcttttgatgctatgaagtaccctttgttatttgagactaatgaaatgaaatcagtgagttccagcttgtctactagtatgttgcttgaaacaattacattcttttgaacattaaatttatatatttgaactataaggaaactctcccagacttgtattttatatactctaagctccattgaccatgcagaaatctgtcagcatatgagaggaacaagcggattatttatcaggcagattttataatgcagaaatacgaagcaacatagtgctgtggtgaagacagaattgaacattgttagacacttagcaatcccaagaggcatcatgaagtccatgtaccctacaccatagaaaaggctacaccccaaagttctggaacaagcctggtttgctggctttctggtgtcaaatgtcagaagcagaaaatgggaggatggtaaaacagtagactcagtgagagcaggactgaacttcagcaggccccataattgtacagaaacaagattgctaggctgggtgctgtggctcacgcctgtaatcccagcactttgggaggccaaggcaggcagatcacttgaggtcaggagttcgagaccagcctggccgacttggtgaaaccctgactgtactaaaaaaaatacaaaaattagccacgtgtggtggtgcacacctgtagtccctgctactggggtggtggggggagctgaggcaggagaatcgctggaacccgggaggtggagactgcagtgagccaagatcagaccactgcactgcagcctgggcgacacagcgagaccccatctcaaacaacaactacaaaagatttctcatggccacttagtttaggaagaagacccccatgtagttcatgaacccaatgctgtgaaccaaaatactataaacactagtattctaggtcaccactgtgatcattgagaaaatgttgaagtatattgacatattttgtttaacaaaacaagggacttaaagtgcgttttagaaatatttgtatacatgctggtttaaaaaagaaaagactaaaaacaagccttagtacataaaaagaaaatattcagttttccagaaaatgaggttactcccttacattgagagttacatgaagccttgttacagtacttttagtcttctttattcaaagaaagaattaccaatatcattttttttttaagatggagtgagtcttgctttgtcacccaggctggagtactgtggcatgatctcagctcactgcaacctccacctcccaggttcaagccattctactgtctcaccctcccaagtagctgggattacaggcatgcgccaccatgcccagctaatttttgtatttttagtagagatgggatttcaccatgttggtcaggcaggtttcaaactcttgacctcaggtgatccacccgcctcggcctcccaaagtgctgggattacaggcatgagccaccatgtccgaccaccaatatcattttttaaaagtaaattattacgatttccttaggtggttaataaattaccattattttctctattttacagatcacgaaatgataagtaacttaccgaaagttacattatttaagttaatcaaatgtttattgattgccagacttttttctaggcttaagcaaatgttggaaaatacttctctgagctttcaaaaatgttatttctacttgtcagtgctgcaggagtttaatacagataatttaggctgggcgcagtgaatcacgcctgtaatcccagcactttgggaggccaaggcgggcagatcacgaggtcaggagatcgagaccatcctggctaacacggtgaaaccccgcctctactaaaaaatacaaaaaattagccaggcgtggtggcgggtgcctgtagtcccagctactcaggaggctgaggtaggagaatggcgtgaacccaaaaggcggagcttgcagtgagccaagattgtgccactgcactccagcctgggcgacagagcgagactctgtctcaaaaaaacagataatttatctacatactgtatgactttactttaaaaaatgtttgtatccttgtagtaagactgttattttttttaatcctacatcacatcatgcattcctgagtgtgagctaccagtgtttttgtctagggctagattactagagctaaaatatcgggagaattaatgagaaaaaaaggcttaaccactgaggctctgtcaatatcagtttttgtggcaggctatgtttactttcttcaaggaaaaatgtcaggcaaaattttatcactacaaatacaaaagagaagaacattaaaaaaatctgatcattatagaaatcatagtcagtgcagaatgtttcctgcagaatccaagtgtttagtgaatgttggtggaaaatatgaagtgtgtcatgtgattggaaagtcatttaccatattcatttttcttttaggaaaaaaagtaaattagattttgtatgagaataaaccttactgagacttgttaattttgctctgaaatttactgtttgatattaatctggccagtctagctttcttttagattaatgttaccatgatacttcgttttttatccttttacttttcatatatctgtgtctttaagtctaaaacgagtttcatatagacagtatcagtatgtagtctggtccttttttatctgctgtgacaatctttgccatttaattgcagtctttacaccatttatatgtaatggaattatcattaatttacatgggattataatttacatttaatgaccactatccttttatttgcattcagttcatcctcttgttccctttttccttctgttgggatgagtatttttaattacttcattttattatgtttggttgtattagtttctaatatgattagctgtattagtttctaaggctgccataacagattaacatagagtgtctcaaaacaacagaaatgtattcatacacagttctgaaagctagaagtccacaattaaggccttggcagggtcatgcttcctttgaaggctcttggcaagaatctttccttgcattttcctacgttgtgttagttgccgctaatcctctatgttcattggcttgtggctgcatctctccagtttccgcctctgtgttcacatggccatcttccctctgtgtgtgcctgccatttccaaatctttctttccttataaaaatagcaatcattggatttaggggctaccctaatccaatattggcctcatgttacttcattacatttgcaaagaccttatttccaaataacgtcacattcacgtagacctggagtaaaggcttcgagatattgttttggggaacacaatacgacccgcagcattagttttacctcttcgtgttttgttttgttttgtttgtggttgatctagggcttgtaatgtaaatctttaatcaatcagtctactttccaacaatattataccacatcacatatggtgtaagaaccttacaacagtttacttgtatttcccctcattttgccaagcataaaatactattgctttaagctactgtagcatctcccatatctgtcccctcctctgtattcctactactactgactaaggtgagctccttgttatttcttgccttttgtcttgagtagtctggagtttcaccagtttaccttagcgatcttgcccttacctatctaccttcctttctcacttaggtatcgtgtttatgtctccagatatgcctgtgtatgttacatctctgtactttgctcacactgaacttgaacaccctcccctccacttatctttcaaacagttatttccctttcaaaaccaagacaagtcttgccttctttgaatcactcaatgcagtcagctgtggtctccctctgtgccctgctatggatgacacacaatctcagtcccaatcccaggtcctgttacgttttactggataatttgtctatcctcttcctcccaaggggataggaaccttgtgagagtcatctcctagcatctaggatgtcaccagactgataatcactgttccatgaatgtacactaaatgaagttatcaatgaatcagtaagttgagtgctggtttcactagtccttactgtttactgagagttgtttataaatgactaaatgttcccttggtaggtgttgtgatgaatcctacctaccctgggtaagttccttgactattcattgttaacttcatcgaaagttacttgagaatcaagagtcattttgacagcttcaaatattgacagaaggctgtggacatattttccagatgccttaaaaaaataggatgatttcctcattgaagtagaaaataacccttgataccaccagttcaactcaaatatttacttgggcaaataattatttgcaagcaaagaaaccatcttacggctttttattctgacacattaaagcacttaccatgagaaaaccatacaaacatcttttagataattttgaccagaaacattggaaggacattcatgacatatcctggctgcttagaggtttgcaaaacatgctgctccactctttttttcttaggcctgtacacagatcccaagtcattttttaaatgtggaaatgtttaaagggttgtagtgttttctgattacagaaaccatacgaattgtagctgtaattgtggggctagagcctgagggagcttttcgctgattcttgttcggggggatttccttgaagtcgacagtggaagaacattataaagcaaaaactacagctccttacacttctccttagctgtgaaaataaagaccaaaaaatttactgagatgatggtgaaggccaccaaacctcacagggctgagtcagctggtgcctatgagggcgcccctccttgacacttccttccttttggcaggaaggagaggggcagaaagtcatctcctgccgcctccctcccctcagaaaatgatttataatgtttgagagatctactgtgagcaaagttcaacacacatgcctaaaggacacgtcctctaacaaatgaggacttagcaagctgcctaccaggcaccaagctgtgtgtaccacacaggtatttctcacttaatctttacaacaacccattaagataggtgatctggtgtcctgagtggtggccctctctcatgcatatctgtatcccaatccctggaacctgtaaatattgccttatttggaaaaaaagggtcttgaggtgaccctatcctggactatctgcatgggccctaaatgccatctcatggactttcgaaaaggtgaggttgagatgggagtgatgctgacaaggcagggcggctggaggaggtgggagctggattccctcctagcgcctaccgaatacgtttcggcaagtttttttttttttgaagcaggctctctctctgttgcccaggctggagtgtagtggcgcaatcacagctcagtcactgcagcctccgcctcccgggctcaagcaatcttcctgcctcagcctcctgagtagctgggaccacaagtgcactaccacacccagctaatttttgtattttttggtagagatggggttttgccatgttgacaggctggtttcaaactcctgggctcaagtgacccgcctgtcttgacctcccagagtgctgggattacaggcatgagccaccgtgccgggccactttctgtaattttaagctaccaagtttatggcagttttttttttttttttttacaataaccacaggaagtccatgcaggtgccattattgcctcattttacagagggggaaactgaggcttagagagatggattaaggtgctcaagtttgtaaattgggtgtgggtggagctcggatgcatgctcagtccttcgtccagagcctgggctctcaacttctttccagtgaggaaatgcaaatttgcttctgtgactgataacagggtgggtggataccagccagggtctggtgtagctcagcaggttgctcccttctgccatgcaataataagaatcacctgtggcccaggcctctctaaagagattgaagtcttagaggaggttggtacctctccaggccacgggacgggaatgacagtgcatttgcctgtgtcgtagccacctgcttttaatcagcactttaaagggggcagaaaccacagatttcacataaattgatattgagcagttgtgtgaattccatttggacctcctctggtggtggttctaacccaaattatttaaagtatttggtaggaacacaagccacttgctgatgagagagaggagtaaaaaaagacactgatttttccattctagaaattttatttcttaaagcaagaaatccttaattgcctcctatgttgctgttcttatttgcccctttttagtggtcagtggggtgtgtttcttaattgtgatggcacagaattcaccttggtcccaaacaagaagtgaagggggttaagaaatctaaaaggaatgaagtttatggaaatgtgagtcacctctcgtcacacaccactacctcctcccccagtcaaggaattcctctgaaattccctgcatgtttctctttagactcttaagacccctgggtacttgcatctccatttagaacaacttgagagaatccctggcctgttgtatttcatatacttcccagtgtctcacacacacgcagacttgcttttctgacacgtgcagagttttactcttttttctcgggtgaagagacgtaaccatgatggaaaatgagatcccaagactaaaaccagttagatgatgttcatctgcttctaagccagcattctctcacaaaggcttccctttgaggtcttcctgggtgtaggtccttggggaaaacgtgccaagtttctgcacagactgtcccttgtctcttgacaattgaaagttccacggcaggttaaagaaggctctgggtccgggtgcagtggtccatgtctgtaatcccaacactttgggaggccgaggcaggtagatcacctgagttcaggagctcaagaccagcctggccaacatagtgaaaccatgtctactaaaaatacaaaaattagctgggtgtggtggcggacatctgtagtctcagctactcgggaggctgaggcaggagaatggcttgaacccgggaggcagaggtagcagtgaaccgagatcgtgccactgcactccagcctgggtgacagagtgagactctgtctcaaaatcaatcaatcaatcaataaggctctgggaatagaaatgggaaagattctccagtgcgggcaaaggaaagcacagtcctgattaaagcttcctgccagcattaaatgtccgttcattcactgcctcctccatggtgcgatgcgggtggaaaggaagcgacacattcgtctttcttgcaaagagcttgcaatgctgtattctgttgagcatgtaagagtggggagctgtgtgtgttttatgaaaatgtcttttgttaccaagcatagctcttattaaacggcttcttttcttttaaagcctatataacatgagttacatgggcgtttacatcaattttgtgttggtatatagtaaattaccccaaaacacagtggcttaaaacaattgatgtttattatttcacagcatcttttttaattgttgttttttgagacaaggtctcactctgtcacccaggctggagtgcagtggcacagtcatgactcactgtagccttgatctcctggcctcaagtgatcctcccaccttagccctgtgagtagctgggaccacaggcatgcactgccacacctggctaattttttatacttttccgtagagacagggttttgccatgttgccttggcttcatagcatctttgggtcagaaattggtacccagctgagcaaggtgtctgcctcagggactcacataaggctgcaatcaaggtatgggctggggctgcggccatctcaagacttgagtaggggaggacccattcccaagcctgcttttcgcagggtttagttccttgcaagctgttggcggaagcctgccttgattctcgccatagggcagctcgcagcatggtagctggcttccatcagagtgagtaagagagggcgagccagacgaaatcagtcttataacctaatccaggagtgacaccccatcacttttgctatattccatatacttgaagtgagtcactaggtccagcccatactcaagggggggatattgtttgaacacttaagtaccaggacaggggacaggggcaaattagaggggaactcagaggctgcctaccatagcagaacagtaagtttcacttgaagcaaacatatttatgagaatcctaatttatatatatatatgagagagagaggggggaattatctttctcttctttcctttaatgaagtataattcacatattacaaaatgcatagatctgaagtgcatagtttaatgaattctgaaaaatgtgtaggattttgttattttataaaaccctgggccatgaggtttctttaaatgccaaatactatagatttatttacagtgtatatatttatgtacagtgtaaacaataggtgtatttggccaggcacaatgactcatgcccgtaatcccagcacttgtggaggccaaggtgggcagatcacttgagcccaggagtttgagaccagtctgggcaacatgacaaaatcccatctctaggaaaaaatacaaaattagctgggcatggtggtacatgcctatactcccaatgagtcgggaggttgaggcaggagaatcaacagagcctgggagttagagggtgcagtgagccatgattgcaccactgcactccagtctgggtaatagctaagaccctgtctccaaaacaaaacaaaaagatgtatttgttatgtattgcatataacaaatgtccctaaaatgtcgtggcttaaagcaacaccatttattttctcgcagtttctgtgggtcacagttcagctgcgtgcttgtgattgagggtttctcccgggctgcagcccagaagtctaatcatctgaggctcgactggggaaggatctgcttctaagcctgctcatgtgatggcaggattcagttcctcgttgacgttagactggacccttagttccttatggctgttggctggactttgccctcagttccttgccccatgggctccttgcttcctaaaagcacccaagccaagattgcactgtcaggagagaactaccagcaagatcgcagtcatggtcttttatactctaatcacataagtgacaacctgacattttcaccatagtctgttcatttgaagtgagccactaggtccagcccacactcaaggagagactacacaagggcatgagcaccaggaggcagggacgcactgagagccatgtcagatgccgcctcccgccatgtatgatgaaatacactatagacacaactgttttaagagcctaccagttttatgaacccaagtatgtctttttagtagaacatctaaatctagacagctagaagaactacattttataaaaatctgaatattttcttttttttttttgagacagagtctcactctgttgctggtgccagagtgcagtggtgtgatcttggctcactgcaacctctgccccctgggttcaagcgattcttctgcctcagcctcccaggtagctgggactacaggcttgtaccagcatgcctggctaatttttgcatttttagtagaggtggggttttgccgtgttgcccaggctggtctcaaactcctgagctcaagcgatccacccgcctcagcctcccaaagttctgggattatagcgtgagccaccctgcacctggcctgatgaatgatttttaaattgtgactcccctatgctcaaatgagattggatcaaatgtcttctctagcaaataaataattccatagctagaaagatctttggtaggtagtttccttcctcttgtgtgttccctgagctctcctactgacgttttggaatattttcacagattcttgaatactcctccctgccagaggtaaagagcttaactcttatcctcttaagtgtggactagatttcgcgacttgcttctaatggatagaatatggtagcagtgacagtgtgtgacttctgagaatagctgtaaaaggcatcgtagcttcctcattgctgtttttcttggatcacttgctctggggaagcccagcagccatgccgtgaggacactcaagcagcctttgaaggagctgctggtgaggaactgagtcttcctgctgacattgacatgagcgaagcatcttggaagtggatcctttcatttttcaggtaccgtgccagggcctgtgagggaaccaagacgtgtaagacatggcctctcattagtgtttaagcagtagagaaagctggtgccatctcattgttcaggagatgaagtgtgtggccggggtgatccagagagtctccttgaaagtacagtgttgaaccttggactttggggtagaattcagacagggtgatggacagctaaagtggttcagaggctggggtacagcatgaggttattaaaatgatggggctgagaagtacaagacctgtaagtgaagaactgggcaccagacattggcatgaagagaaagaagacacctgtgttcagaagtgagcctgccagggcagagttaagactttttgctggccaggtatggtggctcacgcctgtcatcccaacactttgggaggccaaggtgggagaattgctctagaccagcttgggcaacatcgtgtgaccccgtctctatgaaaaaaaaaaaaaacgagagaaaaaaagttatttctcaaaaaatagccttggacttgttcaaatttggatcaggtgtgaacttgtcccagtggagccatggagcccaggctgtgtgtcagaaagcctgcaataggcttccttgacccagaagatttttagagcctccattaccaatcacgctatgacacgtttcttgttcccattggggcctgtgtttcaaactttgggctggaagagaacattcccgtgactactcacatcatttctattacctacagctcttctcccctgtattgctagtctgcctctaccttttgagatcctactcactctccgaaggtaaggtgggtgacctgttaattttaaaggacttttttttggtggggggcactagcaaataaattaaatctatggatgtgaagggagtttggttatgacatccactgccccattaacagccttgtccttcctcttggcttcccaagctgtgtgttctgttgaagaggaggcctctccttgccccaggaatggatcagccagttgggattatctgttgcctctaaacacttgtagtactgtgttgatgccatcccattgtacttgtgattccacgttgtcaccttaagtagattgtaaattcttttttttttttttttaaagacagggtctcactctgtcgcccaggctggagagcagtggcacgatctcagctcactgcaacctctgcctcaggttctggcaattctcctgcctcaacctcccgagtagctgagactacaggcgcacgctgccatgcccggccaagtttttgtattttagtagagatggggtttcaccctgttgcccaggctcgtctcgaactcctgagctcaggcaatccacctgcctcggcctcccaaagtggtgggattacaggcgtgagccaccacgcccagccagtagattgtaaattctttgaaggcaggtatcgtatctttctgtgcagtcagcacagcattttaaatgcaatgcttgcttatgaagggctgtttttctttctggattgttgcgtgtggcagatggagtgccacgcaaccagacttcttggctacaacacacatgtggcttcttttatggaagttgccacctgcagatccttcaccaccaagaacatgcttttctgtcatattgcagaatctttgtggaggatcctcgttcttccttaacttcctttgtgccacacgcttccccacttcacttgggcacctttgaacagagaagcaggattgctgcctccccaccagtgtaataaatgctctttacaaatgtccctccttggaagtatatcttgtagaaatcctagtttctaacttcatccaagaaatttctagacaacttgtagcctagattatcctttaagagccacttacactactggaaaacaactccacccaggttcttatttgagttacagggacaagaagcctttggattgcaggtttaaaaaaaaattttttttttattgctgagacttctattatgaactaccacagttgacaaactgttagtttccatagcaattttagactgtccttaggtgaagggtttcccttccagttgctatttaagatgtgtggaatccaagaagtcacaaaaggtatttcatgtgtcataccttggcaatgcgtgctactaattatttttttgttcctgtcgttaaatatagagccttctcatttattttgtcaaatgcattttcctctactacttttttttttctttttaaagaaagatgctctgtgaaaaggaagccattcatccatccaggtgagctctggatgggcgagccagccatggggactcctccctgggactggagctctttttgactgagctgcacctttgagcatcgagtttctgtttaccacctggatgctttccattttgaacacatttgggcctttcactgaaaggcactttaaaaattcaaggttttagcatcatcaccaaaaacatctactaaaatatgcatttgtacctggagtcatttaaaacaaatgagttaacctcctgtgctctgagaataatcttttctttcttcttcttttttttttttttttttggtcaagacaatagtcttcatgggcattaggtgacaacagctatgcaatttcattttagtccataatacattatttaaagaggttattgaaaatgttgattcctggagctaaagaaatggaaatatttaaccaaaagaagagaacatttgaagacctcaaagctttcatgagatgtttgaaaggcagttgaatgtggagagggtatgctatctgctatggtctggctctgtttccccacccaaatctcaccttgatttgtatcaagagcaagaacagttggagacaactaaatcatggggggcagtgtttttcccatgctgttctcatgatagtgagttctcagagatctgacagttttataaggggcttccccctttgctcagctctcattcttctctctcctgccgccttgtgaaggacatgtttgcatccccttccaccatgattttaagtttcctgaggcctccccaggcctgtggatctgtgagtcaattaaatctctttcccttataaattaccccatctcgggtatgtccttataacagcatgagaatggactaatacactactacctgatactccccggggaagaaccccacagcatcaggataggggataaggaaagcaatttgggtcaatggaggagcaaatttgccagcagtttggagctgttgatagttggattagatggtttcatgaagttttgagcctctagattcagagaccaagtgaccaccttccccttgcgctgagagggaatttcttcaactggttggaaatggaatgataggtaggatccagaagggctatctaacttgataatttatgtgattgttttctcatttaagggagagaatattatctacagtgtttctgatttttttaagggccttggggaaggacataatgaattattcagagacttctctctgtgaagcaagttgcacagagacagacaacttgatacaaattacgattctaaatttgttagtaatatattttattcatgcactctacttacaatagatttcctgcttgacatttcttagacatatcactcatgatcccacagttgctctttgaatgggtgcgaaacctgtgcaaaaaaaaaaaaagatgtacacagtctaatgaattatgcaagtcttaaaatgtctcaagaaaaagattactcattaggattttcgaatgaataaattcaacataattgttggtgcaactgctctctcatgtaataggtaccaaaatctgattcatgttttatattggagggacgggtacttttctgaagaattttaataaaggcaaataaatgccttttctaggatgctttatagtagagcccacaaaggttttcttcagcaatactatcagtgctgcttttctctccatacttccaaaacctagaattttttgccagtactttttccctgttttcttctgagtggtaaaatccatctgggcagattttctacaggcctgtgagggggtgttagccagagagcagtgttttgagctcatatacagaataggtgcctctggatagaagttccgatcccagtatcctctcccaggccccagttctgcacaggcagaggacaccatccccatgcagtccagacacctgccagcaaatgtactcgtttgctgacatctagggagccttgtgatgcttctgaatactgcccaccgttcccaattgctgaaatgtttaagaactttatagctctagccaatacgggaatagctgtacattcaggaatgctcgtgaaatgtggcagggccttgccctcctaggcttgaggcccaggctcctgatggtcggtttgattggtggcttatccatgcacctgatagttatttatggctacgtgctaggtactgtgcagacaccgaagcataaacatttcccctcctggggcttctggtcttgttgaagagacggacagtcaacatgtatgccaataaatacattatttgtttaaagtcacagtaggtgctatgtaggcgaaaaacaaggagtactggtaaggaataggagaagagggctttgctgggatgggacctttagcagagacttgggggatgtgtgggatcagtgtagggagaggagaggggagcaagccagggagaaaggagcttggccgagggcctagagcacccggggcaaagggggacctggtgcaggctgaggcaggtgagctgagcagaggcagacagggcccagtgcagtgaggaatctgattctcatccagctgcaaaggtaagagttataaggttttaggctaagagtgagatcatcataaagatggccctgactactgcctaggaggagtggagagtaagggggggagggaggacagactgtaagtggaaaagagagaatgtgagaagagtagtggttggcaattgcagttgttttagtccaagatgatgatacccgcagctggggtggtggcagcgaaagcagccgacggtgaaggtctgcatggaggttcggccatggacctgaggggtaatctgccatgcagttcagaatgatgaccctcggaccgggcatgcttctcagttaacatctgatgctgccctactaaaggcaaaacggatggtctaatgcaggcaaactggaaatagtgctggtaagaactgagagcacctgtgcttgccatccccatgcattcgaacaggctgtggcttccctctgggctcaagtggaactgtttggacagtacacatttgaatctgtgacagctcttgcactggactgggaaagttttgggcaaaaggagtccttgaatcagagactcttaatgcagggacagaccttaaaagccctccaagccctccaggccgggcacggtggctcatgcctgtaatcctagcactttgggaggttgaggtggatgggtcacgaggtcaggagttcaagaccagcctggccaagatggtgaaaccctgtctctcctaaaaatacaaaaaaaaaatgagctgggcgtggtggtgggcgcctgtaatcccagctactcaggaggctgaggcagagaattgcttgaactcaggaggtggaggttgcagtgagccaagatcacgccactgcactccagcctgggcgcaacagagtgagtctctgtctcaccaaaaaaaaaaaaaaaaaaaaaaaaaaagctctccagtaccctcatcttagagtttagggaactcaggctcagagaggtttgagttattcatacaaagacacgcagccggtgagtgacagagagaaactgtccaataaggcaaattttttttttaagaattttgaatgatggacttataagtcttcattaagtccttataggatctaatttttataaatcctttcagaactaatttatttaaggattaagccagtcaaaatcccagaacggtttcaagtcaacagcttaaaagtggaatctgaatgttaaccaagatgattttccttgtatgtggacggctgtaattgggccccagtctctcatgtgaaaagccaaacagattcagatctaatgagttctggccgctggggcagatggattttggaatttgctatttatagtgttttcaagtgtcaccttccccttttaataagcactgagctgtgatctggccccaggagcctggagcacattggtaggtgtgctgagggcctcacagccgaatgacttctggtccaggtttggaattgaaggtttaagttgggatgttggctattcctcagaagtgaggatgtgttcttccaaataaatggtgatcaatccctgtgcattggagagctgatgggggtgtgcttggcggagagaggcatacccccagaggcttgaggagggcagttgtatttcacgtgctgaggagagtagtggtgtggttaaatcaggaataaaaaaaaaatatgaagaaattgtcagggagagcttcagctgggcccaaaggaaatcaagaaaagagcaaatgagaatgcaatttaaaatgtaaatacaaactgaaatcaaagccatttctatgaaacatttaagaacattctgtaagtattgctggtcaggaaagcacaaaaaattgtctgtgttttgagcccattgtcagtgtattatttagagggaagttctgatttttgctaaggggttattccgagttgcgaagtggtgtggtgttgggggaagaataccaccaactccaggccagctgctgcatctcctggaatctctgttttctcttctgtaagatgggagtcagggtggcctccatctgatcacactgaattgttgagtgactcaaaggagataatgtaccaaacactttgtaagccctatgacaccgttcaaagtctatttcctcccagctctgttttctaaaatcaggctgtatgttcgaatcacctgaggaacttaagactattaccagcgccaccactggcatttttcattctcttggacagcagaggttttccaaagccctggatgtcattctgctgggcaagtctggctgacggggctctgaggagttggagggcctgtccacccttgcctttgggaaaccagccagccagtggtccaaggagattgtcggctgtcttcccaagtcagcgccatcttccttcctgctcatttcctgtctcccagtttttccctggaacctttccatttaaatatgaattcagctgcagcctgcggggatctgaagtactagcgagttgactgcctgaggaggtgggcctgtggagaaccagagctacagttttccacaaaacatatcattttaaatgattctgaagcctgttaaattacactgatgggattaatctgataaagtggtaacagggtagatgcaccgaaatgatcgctttcacatgctttttaattcagtcaaaattaatgaaagatcttgtgtttacggatggaactggagtttaaaattctgaattcattagcctgttttaatgcataaatctaacttccttgtccgtgtgtgaaactcaactagagtgcagctcgatgctactctgccaagagaacaggcagaaggaagccacattttacccttgaagccgggttagccccgtgccttgatcatgccactgagaatgtatgtttctagtctgaatccttttggctttatgttgtcattcagcgtgtgtcatgtccacacccagggataattcctgtcttagaaataaggtgtatgatccagcaattacacttctggatatagacccagaagagggtctcgaagagatacttgtatgcccatgttcgtagcagcagcaacattcacaatagataagaggtagaagcaacccaagtgcctattgaacagatgaatggataaacaaaatgtggtaactacatatgatagagtgttgttcagtcttcaagaagaaagaaatgctgacacctgctacagtgtggatgaaccctgaagactttctgctaaatgaaaaagccattcaaaaaaggacagatattaaacgattatatgaggtacttggaatagtcagaaatcatggcaagtataatgatggctgctagaggctacagggaaggaggaatgttaatgggtatagagtttcagttgtggaagatgaaagagttgttgaggtggatggtggtgatggttgcagaatagtgtgaatgtacttactgccatacaactgtacacttaaaaatggttaaagtggtcaatttaattatatatataattaaatatatataattaaattatatatataattaaatatatataattaaattatatatataattaaatatatataattaaattatatatataattaaattatatatataattaaatatatataattaagttatatataaaattaaatatatataattaaattatatataattatatatatatatatctcaccacaataaaaaaaaaagtaaaacataacaaaagaatagaggtatctgtaggagctctctgccctaattcagatgagtaccaccctataaatgctggtgaagtctacaggatttttgccagcatggcaaccactgtgctgtccattcttggtcagacctgtagaagggaaacagcagttgtggaagtatgtctcaggcaccctggaggacacctaaggggaaactcatctgacaaggacacagacatttttctaggttccctgagtcttctgtgtggtccatcctaccagctggggttatctgatattccagtgtatgtgaaaataatagctaagttttgtttttttttgttgttgttgttgttgttttttggcagagtctcactgagtcacccaggctggagtgcactggcactatcttggctcactgcaacctccatctcctgggttcaagcgattcttctgcctcagccttctgagtagctgggattacaggtgcgcgccaccacgcccagctaatttttgtatttttagtagagacagggtttcaccatgttggccaggctagtctcaaactcctgacctcagattatctgcccacctcggcctcccgaagtgctgggattacaggcatgaacactgtgcctggccagcttgataaatttttatgcagaatggttttattttattattatttggaagggaatagtggcccttctctctgatttctggttatatacctataactgtagcagctatttcatcctgttagctttttttttaaaaagatattttttagagccattgttttagggttataggaaaatggagtggaaagtacagtgttcccttatacctgcccctctcctcaacagtctcccctcttattaacatcttgcattaattagtgtggtacatttcttacaactgatgcaatattattaacaaaagtccatggtctacattagggttcggtcttggtagtgtatagtctgtgggtttggacaaatgtgtcatggcccgtatccacctttatagtatcatacagaggatcttcactgccctaaaaatcctctgtgctccatcttgttcttccctccctcccatcagcccctgatccttctattgcctccatagtttttccttttctggaatgtcatatagttgaagtcatgcagtatgtagcctgttcagattggcttctttcacttagtaatatgcactttagtttcctccatgccttttcttgacttgatagttcatttctttttagtgctaaatcatattccatcatctgggtataccatggtttatccattcacctattcaagggtatcttggttgcttccaagtcctgtgctcttttaagatttcagtttttgacccttgatgtgacaagatgggaagggccacaaaatatctcattctttttctcctgttgacttagtctgaatactccagactgtgctgacctgtgtggttcagtctaggagccataggctctgtgaggctgttgaacagttgaaatgcggctggtccaaatggagatgtttgtactgtctgtgcagaggtacgttggatttcagacttagtataaacaaaagagtttaaagtatcattaatttcttacatcagttatgtatagaaatgataatttatatcttggattatataaaacatttaaaaattgttgtacttgtttcttctttccttccttccttccttccttccttccttccttccttccttccttccttcctcctttctttctctctctctttctttcttcctctcttccttcctttcttccttttcttcctttcttccttctttctttctctttctttctttcgagacagagtctcgctctgttgcccaggttggagtgcagtggggccatctcggctctgtgcaggctctgcctcccgggttcaagggattctcctgcctcagcctcccgagtagctagaattacatttgcccaccactacacctggctaatttctgtatttttagtaaagatgaggtttcaccatgttggtcaggctggtctcaaactcctgacctcaggtgatccacctgcctcgaactcccagagtgctgggattataggtatgagccactgtgcccagcctctttttaattgtttaatgagactactagaaaactgtaaattacctacagctcacataatgtttctgttgggtggtgcttctgggaaaaagaggaatgcgtggcttttgtccatggtgcctctttaaggatgttattcagctgatgtttctcaggtacctgctatgtgccaagcactgttgaagcacttcagataattcagtgattgaaagaaacaaaacccatgactttgtgggttttagtacattagatttggatattatcaaattattttggcactttttctccacagtagcactactgtttttaaaagaccagtgccagccgggtgcagtggctcatgcctgtaatcccagcattttgggaggctgaggtgggtggatcacgaggtcgggagttcaagaccagcctggccaagatggtgaaaccccatctctactaaaaatacaaaaattagccggacgcagtggcaggcacctgtagtcccagctactcaggaggctgaggcaggagaatcgcttgaacccggttggcagaggttgcactgagccaagatcacgccactgcactccagcctgggtgatagagtaagactccgtgtcaaaacaacaatcaccaccaccaccaccacaacaagaaacacacaccagtggcccaggaaagacaaaggaggctttaggatatgtcccggttctcattctggtcccaacacttattatggatgtaacttttggcagttccttacccgttaagccttggtttcctaaccgtaaaatgggactaagtaattcctctcatagagtgctgcttgtgcaacatggggtcagaatgagtactcaggaagtgattcccactcagcccgcatcccttcctggagcactgcagttttgggattcttgtctccagcccagctcttacagcccctgagagcatgctgagcaggggaaagctgctctaaagttcaatttgcattgtaccttctccatttacatttcttgaccttttgctttctcatccagcaatccccagcagggtgtctgtgttctaaggcacccacctagcctctttctgaattttaatcccagctctggctaaaagcctgaaagcaaaatatgaatcgtagctccacaattataacgtgggactttctttataaaatgaagttgctctagcagaaagccagggctacaaatcagtagcggcttcaggatgcatggcctctttctggcataggaggcccctttttcttctcagtcgcggtgtttcttccaacatctatgcatgttgaagtctggagaaggctgatgctgagagatatgtactaatgaaatgcacaggtgttatctttttctgttccaagtccctgtgtgccctcctgtcttggtgggtggcatggcaggacatagaaacacttggaacctgtttactattttccaaaaaggccttgcctgtagcccattgatctacccactatgtatattcattttaatgctgtttttgagtccgttgactaccccgggaaatcaaagttgactaccacagccctagtcctcaagtgtcttgcctgcaatgaggttacctggcctattagaattaaggactaaaatgcaggagctggggtcacacctgccagctgtttgtgagccctgaagatgttggggatttaaattttagatagatcattgtagctgcaaggggtaggacggataggtggggtatccagagtccttggataccttgtcttcctggaccctctctcagcacccttgggctaagatgcactcttgaacacatttcctctatggcccctttcagatctgctgatgatacctggattccttctttcagagtgacccagccccatcccagggaacgggcagatgggctctgttgcccatctcaaagttcccttactttttttcttttgaggttttatcagtccagaagtggaaagaagatggatgccattagctttagaaatattttttatgttttagggagaaagaagcagagaatatacttttagatgagcacactttaaaataccagtaagacagacttgttggaagacaggcattgtgaagaactgttgttgttttttggttttttttttttttttttttttgcaacagctttccccactttgggaaatgagaacttatgccctcctgaatgttgtatttgatgggacttagatccatgggggaattttattttattttttaggaaaaggtaacctactaagtatagttatatccttctagcatgaaatataatcatttattagaccagaactgtttgttaattcagcagtgtgtcttgaaaaagagccaccctcaaatttaaagtagaaatagattcttcattctacacctttttgacatcagatttgctttcctggtctcagtgcaggtgcccctactgtttggtgtttgggacacagcctccgagtaagtccaaggagagcttggggttaggcagtataggccatgagccccttgccagcctcccagggactttgagaggagctgtttggggcaagatgcttaatgaaaggatgttttgtaatttagagagaaaaaagaaatttatcccatagataactaaaccctcaatgggaatattagaaaatacaattgtcacattatgtaatatttgtacattttccactgcaagtaagaatgcgtcctttccttaattttaaaatatggaaaaggtcgacctttctgctaccgtaaggaaaatcaagggaaagggaggttttatacatgatatggggaacttggtataattatttagctcagtatgaaattctgccacaggaatataaggtaattaatttctctaagtatgaaatgcaatcttgaaaaactaggaaacaggtgccgaggtgacaagataggaagagaagctgagtgttgtgcagtggcaccgaacaacttctggaacattccagagcgtggctttgtagctggagagagcctcctggcttctgtgtggcgaccgagactgacccctgctggcagattgttgctaagccgtggctgttaatgaagcagggcaataaggcccttaagcaggagatcctgccaggccacaggcaggtctgtctccgaggctatgccttgtaccagcccttgatgctgttgcctgaattcccagtgggaagaaaaatggacccagcagtttttagtgttttggtctcagtttccaccatctctcccctttcccagtctgggatgtcagtgtttgctctctcctccctaccctctgttacctcaagatttcatggaaataaaaagccctgctaacatcacaaagaggctgaaaattccagatccacctcggagccagacacttgagaaatttgatgccaaggtaacctgcgtttgggaaaacatccttattaggtttatttaagaacgatttgaaaaattcctataagtgaaaatcagatgggaagaagtccaaaaatctgattcatgccatgactgtgatacaaccaagatcttcgtgagccagtggatggggaagagagataatgtacaatatttctatgtgtttcctggaaaaattcttaaacggattataaaaagcactaagtgtaaaggaaaatgttaatacattggactgcattaaataatagaccagcagaggtctggcgtggtgactcatgcctgtaatcccagaactttgggaggctgaggcaggcagatcacttgaggtcagtagttcgagactggcctggccaacacgatgaaaccccatctctagtaaaattataaaattagctgggcatggtggcacacacctgtaatcccagctgctagggaggctgaagcatgagaatcacttgaaccccaaaggcagaggttgcagtgagctgagatggcaccactgcactccagcctagacgacagaataagactctgtctcaaaaaacccccaaaaaatagatgtgcagagtctttatttgtggtagaggttagtgttttccccactacattttccaccagcttgttctgggagctgcttttgggtgctggtgaggagtaattcgtggtttaggaagcttgagtgcgggtgctgggtcctctgcttgttgctcagcagggtactggaggccaggaaggctggcgctgcagaaatctgtcttcagtgcacttactgctgttgccatggacagctcattcgtatagctggtgtggagctaatgaagtagggatgtttttaaaatgaaattttaaaaatggggtttgagaagtacataaacagttcattgtggcataaaatgacattataatcatttaattttgagatgatttaaaaatcatttcctcatgttccatgttctacagcttaccagtcaggaaaaaggataattttgtgggactcaatgaagtgatgaaattgagaacaaagcctttcatctttggacttacacttccatgttcctaaaagagttaggcagggatatgtaggtaaatcaaagactggaaacgtagggtctttggaaacttttttctgggtcatctttttagtcttaaagctaagccttcagttgccaagcagtggtttttttaatgaatgaggctggtcaataggatatctatattttaaaaacctcaaccacaagtaacaccctacacaaaaaccaattacagatagatagtagacctaattgtaaaacaataaatgttctagaaaatgacagagaacatgtttatgaagttgaggtacaaaataattttgtaaacaggatctaaatagaactaaccctaaaggaaaagattaatcaggcatttttgttaattgaaacatcaaagaatgaaaggtagactggtattgggggaagatatttgctacacttatacctgttaaagggcttgtgtcctgaatttaaaaaaaaggtcaggtgcggtggctcacacctgtaatcccagcactttggaggccgaggcaggcggggatcgcctgaggtcaggcgttcaagacagcctggccaacatggtgaaactctgtctctactaaaaatacaaaaattagccaggcatggtggcaggcacctgtaatcccagctacctgggaggctgagacaggagaatcgcttgaacccaggaggtggaggttgcagtgagctgagaccatgccactgcactccagcctgagcaagaagagtgaaactccatctcaaaaaaaaagaaaacctcctcctacagatcagtaagaaagacaatccagtagaaaaatggggaggagatttgtaaacttcatgaaagaggatataaaaatggacaataaacataaagtgttcaacctgggtcatcaggggaatgcaaattaaaactgcaatgggatgtcaccagcagtcgtaagaaagaataaaatgaaaaagaccacagtactaagtgttggtgaggacatgctcctggtatgcaaattgctataaccactttagaaaactgtcagtattgactaaagctgaatacacactcctgtcagacagcaattcttctcgtaggtggatccccaaaagaaacatgcatgtgtaccccaaaagtcatgcccaaaatgttcacagaagtattattcataattgccttaacctggaaacaactcagatgttcctcacatgtagaatggatttttttgtataatcctatcatggggtactgtgcagccctgaatgaaaaacctgttatgtgcaacaaaagtgtgatgtcttgcagacataacactgagagaaagaacccaggcacagaattgttttctgtatataaaactcaaaaagaggcaacactcatctctagtgcctaggggtcaaggtaaccacatcttgctggggagaagagtgactagaacaggcacaaggggacttctggggctctcgttccattctgacgatggacgggtttgtggatacacaggcgagattatgttgtgagaatccatcaggctgcatattatgacttgtgcatgtaaaacatgtatgctacacctattaaaacgtgtttgttttagaaatgccttcagtatgtacagctatgatagatcaacagaaaaaataaaacactttaaaatttctttaaaaatttttaaaaagcagtgccttcaaacacccaggctattgtgcagcgtgttgctactgtctgtgatgcctgcgaggcatgggtgagaggaggaggcggtgccagtgagtagagtgagatcgtgatattgctaaatcactttcttagggtgtgaaagactctgctttagctctttttcgggcttttctgccatgccttactagttttggcagttttcctattaaaattatatgtaatgtcttgatataactgtgctcgtctggagctgtgtatttaaatagctgtaaacttctcaacccaaattgtgggaattaaatttccattagcagattggcagcataatctggtgggatgttctctgggcccaaagccaagagccctgggttctagttacagcttctagtcctgacctggagcatgtcactcagccatcctccgtgggtacctcctcctgaaaataatattaaatctacatatggaaatcacatccacccacctctaaggttgctgtgaaggtaagggaaggtaatatctgtgagcactgtttgcaaattgcaactgcagagtcataaatctgtttgcataaaccacacattccagaggggttctaatcgtgtttacatatacttcttaaatttcgtactaaatgtctgtagatatgaagatgtgaaaacaaaagctcagtgagaaagtaaccaacagaatggaggaattctggagaagtcctaacatgtagtgttttcccattcctaatccctatcatcttgtggcattgcgtgtacttatttctgtgttttcacattattaactgaccattttggatggttgaatatacaggagaggtgctggttcaggaaataattgtttttttttaatccatatttcaaaagtaattcttgtcggtatatacaaatatgtttaagttttattatttgccttttaacaaattacaacatgccacattaggaataagtttgacacaccttaatcattttaagtcttattatcactaaaatttgcagcattctccttcatggaagaaaaagttaatttggtggaacctttagtcaaattaattggtcagaagaaatactgtatacttaactgaaagagggaaaaaaaccccatgttttaatgaacttaaatttaattgaacaaccttcctcaatcaatgttttagaaattgtttttctcaggaaacaaactattgacctaggcaagtggtttaaaaacttttgtttgacggtagacatatacttttgcaaataaaaccttccacggaacctgagtccgtagagcagataaaagaccactctgaagcaggggtaggagtggagaaggtagaaaaatgggtggtagatcttaccactgagtgttttgcttttgaaatacgaagcctgttggatgccatggaaagccagataactattactctgtatgatagtgcagggaacgttctgtgtgtggttgtgttatgttgacattccatccagtgtgccactccgtataattccgtctgacgtgccactccatataattgggatgctgtctgttcacttagctgatagaggtgggattcagagactgtggtgtctgtgatgctgtgatcctagacatggtaagtgcgtaatacctctagatgctgatagattaagctatgattgaatttatagtttccagaatgaatattgtactttgagaggctataaagaatatcaggctgggcatggtggcgcacgcctgtaatcccagcactttgggagacagaggtgggcggatcacctgaggtcaggagttcgagaccagcctgcccaacatggcaaaaccccatctctactaaaagtacaaaaattagccaggcgtggtggtgggcacctgtaatcccagctactcaggaggctgaggcaggagaatagcttgaacccgggagcaagaggttacagtgaaccaagattgcaccatgacactccagtctgggccacagagcaaggctccatctcagggggaggaaaaaaaaaagaatatcagtaactgagaaaatacgcaagatgaaccacctttccagaaatgttccagttagtcaaattatcctggtaacccacagctcactgcagccttaatctcctgggctcaaaagatcctcccacctcagcctcccaactaactgggaccataggtgcacaacaccatgcctggctttttgatttttttgtagagatgggctcttgccacattacccaggctggtctcaaacttctgggctcaagcagtcctcctgccttggcctcctaaagtcctgggtcatgagccaccccacctggccctgaggcttttctgactaaaatattttaaaatgttatatatttttaaaactagtttttgctatagtatgagatgaatatctgtccccttttgagtaaatttcaattaaaaaatacagagtcctgtaattcagtgataagggagctggggaggcccttactttcaaacctgaagaattacatctgcttcccaagaactgctttcttgggaacttttaaaagtatgtatttgtttttgtgagtttgtaagagctgcgttctgtctacagaggaacttgttaatgaatccctcctcttatgatattttatatagaaatgcttggtttgtgggttgcgcccatgacatacactctgggaaataagaaaattatagacaaaccaaaatagaaagcagctcctctctcaaggtgagttcagcagttgtcagtggataaaaggaccttgtaatgagcagctaagcccacactcctgaaatgccttttcattgcaagagtgaaaacgagagataaaggaggttttttcctgagtaattctagcttgcctagcacgctatgagcaacagatagaggccaactttaaaatctccatgactgaattataccaccaaaacttgtgatcagttcgttttctgctgaaatcaggaatacatgggtcattaatatcaagtagaatagaaaagagaaaagcagtacctaaacgcaaccatcttttttatcctcagttggaaaagtgtctgttttcttctaattataaagatgctgcatgctcattacaggaagttctaagagtatcaaaaagtgtgaagaattaaagattaaccaaaattctgggaaaagattgttataacaatgttgacaggcatttacaacaaagcataacattattctttgacattatgctttgttgttgtttttaacaagctatatctagcttcctattattttcattttgaagtgcgacattcacccatcagaatatacactgaactcataaaaatattccatgtttcaaaagatgaaatacaacctttaaataaacacctagaaaaatggcctccctgggcacaggggtgcatgcctgtagtcccagctcctcgggaggctgagactggaggatcacttgaggccaaagagtttgaaaccagcctgggtttaacacagacccccatctctaaaaaatgaatttattttaaaattttttatatggcccgaagggtattaaagacaacaatgtaaaacaagatcctgcttattaagttaatgaaatcacaacacccagggttgacaagggagccaaaaatggcagtctttttctgtcttatggcctatacgttgatatggtatatttggaaatgaatttggtgatatgtatcaataagctttactgtttataatcttgatctgagaacttcatttttatatttatttgcctaaagaaagactatatttataagggtgtttgtgttgaaatggtcattccagtggaaatggcctacatggaatgggctgtacctcagctggacttcaattcaaatggctgtctgccagctccgagccttggacaagtcacttaacctctaaccctcagtcagtctctatatttttaaatggggacgacaataatccctgtctcagagtgtttttatgaagattacaatgtaatttaatatgcaaagcacttagaaccctgtctagcacggagaaacagcgcagttgtcaccccttctctgcaggggatacattccagggacccccgtggaagcctaaaactccaatagtgtcaactctgtataagcaggttgattatccctaatctgaaaatttgaaatgttctaaaaaccaaaactcagcggtgaaaggaaatccccactggagcatttcggattttcagattgaggcatttaaccagttagcatgaaacagatattccaaaatcaaaaaaaaaaaaaaaatcctaaattccaagcacttctggtcccaagcattttggctaagggatacccaacctgtactatgtttcttatgcattaatatgtctgatccatttataaattaggcacagtaagagattaacaacaataataaaatagaacaattctaacaatatactgtagtaaaagttatgtgaatggggtctctccctctctgaaaatatcatactgttgatgttagcaatctgggcatatgaaatttcacttatcgggaattttcaccttttcacttaaagtaatttccagcttctctttgacatatctgaattgccggtgtcaccactctggtactttagggccattatgaagtaaaataaggattccttcagttcaagccctgtgatacctcaacagtttatctataaccgatggctacgaagagactaagaggcggtagcagcatctacagaaggggtctgctggacaaagggatgattcgcatcccagatgatatagtgggatggtatgagatttcatcacactattcaggattgtgtgtaatttaaaacttacaaattgggccaggtgtggtagctcatgcctgtgatcccagcattttgggaggccgcggtgggcggatcacctgaggtcaagagttctagaccagcatggccaacatgggtgaaaccccatctctactaaaaatacaaaaattagctgagcatggtggcgcacacctgtaatcccagctactcgggaggctgaggcaggagaatcacttgaacccgggaggcggaggttgcagtgagccgagatcgcatccttgcactccagcctgggtgacaagagcgaaactgtcttaaaaaaataaagttgtttatttctggaattttccttttaatatattcagactgaggctgaccacaggtaattgaaactggaaaacaaaaccacacatacagggattacttggaaacattgcctgttaccaccttatgcattggtgtgaggcttgaatggagtaacacctgagggcagtgtctggatagagtaaaccagcattccatgttagatgatattcttagtgttagtattagtacataaaacttagaaacaggaccgggcacgtggctcatgcctgtaatcccagcactttgggaggccaaggtgggtggatcatgaggtcaggagtttgagaccagcctaaccaacatggtgaaaccccatctctactaaaaatacaaaaattagccaggtgtggtgatgcatgcctgtaatcccagctactccggaggctgaggcaggagaagtgcttgaacctgggaggtggaggttgcagtgagccgagattgtgccactgcactccagcctgggcgacacacccagactccatctcaaacaaaaacttagaaacaaatattcatctaataactggaggaaaagcaaaataaatttcagatggaggctgtgctatgaagactgtcacagttggttacaacacagtgttcattgtaaggataccaaatttcatgtgcgcggttgctctaccaaaggatatgtgcatgggaagatgaagtaaaaggagatgtattccacaggtatagtaccagcttccatggtgcctggcaaagcataaagaagcttgggttttggcctcttgaaattaatttaaagcatgagatgggcttaagcccatactatagagaccattaagatgcaggaagagcttgataattctggaccagtctataatttgaaataaatgtattttgaagggccaaagccagtggctctttactgcagcatgtaatttgattcctattggtttttgcaaggtgcttgaggacttttttcatgctgaaatttcatttctgctgttcgcaggacaagagaaatttgatacccatgtacgacttgaccaggcttgaaatttcactttatttgatggttcggctagtcatatataaattagtgggttcaggcttcagtagggaacacacacagagccagcagctgtggcctgttcctgtctcctgagtgaggagcattcacgatgttcttttcacttagagagggcttagggaagatttatgtgttcgctgtctctcatttctgttctcaaacccttgttttctccgtggaaaatggtgatgtactttttttttttttttttttgagacagggtcttgctctttaacccaggctggagtccagtggtgcgatcttggctcactgcagcctccacctcccgggctcaggtgatcctcccaccccagcctcccaagtagctggcactgcagacgatgcaccaccagctaagttttgtatttttggtagagacggggtttggccatgttgcccaggctggtcttgaacttctgggctgaagcgatctgcctgcctctgcctctcagagtgctgggattacaggtatgagccaccgtgcctggccctgtgatgcacttttaatcacagcggtatttggtcaaaggatggcagaataactaggcttgtgggctagggagcatccaggagggacacctggtcttccgtgagagtccggcgatggggatctttgcatccctctctcacattggtcaaggcctcatttctactcctgatgtctactcctgatttgggcctgagaggtgcgagctccctttccagagtagaataagcagatggtgattctgagcaatgtgggatgtggactgcagcctgggcaagggagtcccttgagatgagtcctccatagcagccaggatgccaccctgacttctggctctcctgactcagtccacttttagtctctttttctgcaggccatgaaatagctcagcccctggcctgcttcagacctagagctcagccagcctgcacttcggctctggttacgtcttggagatctgctctgtttctagcccagggaggtgcgtagtttatatggaagtgaactatatctttttaaaaatacatttccttcttttcttttttattgcgtccatgtatttagagctaaaggagaggtccacagcatgagtttatacttcaccttagccagaagtccctgccacatttatccttagatcagagaatgacactggagtgaggacggggtagtggggggtagggagtggggtgctgccctagcctgttcccagatgctgcataagtcatcgttttcaatcctgcatgcttagcttccgacccctgtcaccctgccaccccctcagaagctgccgcacacctgctctgtgccatggaccagccagagtgcagggtttgtgtcatgcgccccctccaccccgtgagctctttctttaacctttctcctgcaactcctcctcagccccctttgaaatgccaaattcagaagctgtgtttcccttcctcagccagctaacgagagactgaatttaaaacaaaacaaaacaaaacaaaacagccctcattgtctccctttgatatttgcctttcatctcgtctgtcccagggtcggggcatccacctaggccagcactctggaaagacgcctcacctgcagcaggtagagcccagcaagtcggtccaggcttccgcacatggtcatgtccccatgggtttgtccacatgggtttgtttgtccttggaaacccttcagctccagggagcctgaagtccttggcgaaggataaagtggaaggggaatgcagcatgagggagtctttctgttcatattcaccacctgaaaattacaatggttcaagcagtgcaccttctagacgaggtggtctcagcaagccttaaaaccatctggtcaacaagagcaaaacatgtataaggccatgaatgtacctggggctggtttggtttggtttgcacaaaccaccccctcctctgagtgatgtataaataagaaagtaaacccatctccctgccaagtcattctaaagaagtagccctgtcttggatgcccatgtttgtcttccacaccctttagtgtagaagacatcagggcccacctctgcatcctgggcctgtggttcctgtcctcttcatccagatctgtgactgtcgtgatagtgtcctaactgaccgcctgtctctctggtcttgtgcctcctcccagccgtcctcgggcccccttgcactgtggatcacgtccccatgccgacactcatctgtttcgacctgtgggtggctccccgcgcagctcgccaggcaggcctctgtgaactgactctgagagtgctctctggccccaccgttgcttctcacctctgcacttgcaagaggctacttgtgcttctgtgcaggctgtggcctcttggggctccctgcatctgtggtggctgctgctttctgctcggagcatgtgcacatgtgcgttccctagtcagtacacagtcagcccctgctgtggcgctggcacacagcagagagcaagagaagtggctttgccccccattgaacagacagagtagtagggaagacagacatcaagctagtcatcacgaccataattacgtaattaccctttgtgacaagagctgtgaagtggcaggaaggaagcagaccagggtcaaggatggccttcctgtggtgtgatgtgtaagctggaatttgggtaggaaataggtggagaaagagcctgaagaaagatgtttccggaacctgcgatcaagatgtgtgaaagtcgtgatgggaaaatgaggatgacggtagcagtgggtaggggtcagaggtcacgcttaccaagggtttaccgtgtcaggcacgggtctgtgttacctcatcacgtcctcatacgacactgcaagaaaggtgcttttaccatccccactgcacacatgtgaaaactgaggcacagagaggccagtgggcatgcctgagctcacgtggctggtagggtggtgggatttggacccaggtagtctgggtcccgggatcaagctgcagtcactgcagcatcttgctgggaccttgaaagaggcctttgtgactggaactgaaaccagggagctaaggctggaaggcagaggcagggccatggagatggtttaggaagtgagtgatgaaatttggatttttatgtgatcagacttggttgggaggacagtggattgaaggagaggcaagggaaggaggcagagagaggaattatacaccgaaggttaaaaaaaaaatcgggggttggacttccctccttctttcacttggtgctttctccttgcccttcaagacctggtgcaggtgtcactctctctcctcggctcactctctttctctgcgccggagatcctcaagatcaggggagatgtctcggcatctctcagggttcctcatgcacaggcggctttccacaaataaatgaaaggaatggagggaaaatagttacaaagctaagaagcaagatgtttcattgggtaatttaacttttcaagttcataactctgatgtgactttcacagtgtaagctgcctgtggctgatactttactcatggagtactagtggtctgttattcaagctaaaatttccatttccttattagcctgagtgaccagcattactcccctagctccacattcttagggagtcaagaggtcgctttcagcaggccaatctgtgcacgacctgctggtgctgcagcattccttactcagatctcagagaccctgggattttgcagtgctttggaaagctgacagggctggcactgggggctggctgggatgggaacaggctgcccctcttggctctccatataggcctgagagccacgtggtcccacatgagacactgagccatgtttgggctccgcctccagggttccacgcattcttagcatctcagcaatccaaggacaaacacatcagcttccccgtagctaaacataagaaagttgtccgtgtttttatataaactttactgacatttaaacatgcatacttcatgaaaagtgcaatattgtcagtgtgcggtaaagtgggttttcgccaactaaacacacttatgatcaaaacatgcccggatttgcacccagatcaggaaacagaacatgacgccaccctgcgcccttcttgcttcccttctgtttactgcactcctcgtgaaggtaacctttgtcatcgcttctaacagcctggattaattttgcctgttttttgggctttctaccaatgggatcatacaatgtgtagagaggatgtaggtttaagatgagatttgttgcccccccccatgctcgatttatcccatgttcctagaaattatagagataacacaagtggaaagacagtctcacagtctcatgacaggaaggttacccatccggggtcaaaccatgcttggcacagagccacttgttaggattcagcagtaattaaaatgactgtgttgtttataaattgttttatgagtgcattagtgccttgtttattttttatcaccagagaaagagtgatcctcctaagtaaatgttctagatcagttgagaaagcaaactttctcagccaagggccagctagtaaatatttttggctttgcaggcgcatatggtcttcgttgcaaccactcaattctgctcttgggatgcaaaagctgtcttggacaatatatgcacaaatgaggctggctgtgctccaaaaaagctccatttgtggacattcaaataggaagttcacataattttcacttgtcacaaaatattattcttccaactttttaaacttgaaccatatttgagagggaatctttctgaagtgttttgttttttcttttttgttttttgtttttgagacagagtctctctctgtcccccaggctggagtgcagtggcacaatcttggctcactgcaccctctgcctcctgggttcatgccattctcctgcctcagcctcccatgtagctgggactacaggcacccgccaccacgcctggctaattttttgtatttttaatagagatagggtttcaccgttttagccaggatggtctcaatctcctaacctcgtgatctgcccgcctcagcctcccaaagtgctgggattacaggcatgagccaccgtgcccggccatctttctgaagtttttaaacactgatctaaattctcaggatgagctgagaacattttcttagtaaatatgggcaacatggtttaataaaacatggaaaccctggcactgtccttttgccgtgtctctttgggcaagttttaacttctctgggtctgtttcatcttctatgggatggggataaaaggaaggacatttagccattagccccaggagagccatgctagttatttgtgaacagaaccccatctgaagagtcacggaggatcctagttggtcagtgtccaggctgtggcagttgttaaatattttgaatatcactctttgtcatgacatcctctctactgaggtcttgtatacactatggccagcatttgcgtcgtgtatagtaattgctgtttctcctcttcccatggaaatggctgtaggcattcttggctaagagggatacttctgtattaactaccgcaactcaaggacttctgtgctacaggtggaatatccttatccaaaatgcctggaaccagatgtgttttagattcagatttttggatttgggatttgatatagtgtggctgtgtccccacccaaatctcaccttgaattgtaataatccccatgtgtcaagggtggtgccaggtggagataatggaatcatgggggcggttccccccatgctgttctcatggtagtggataagtctcatgagaactgatggttttataaatgggagttcccctgcacaagctctcttgcctgccgccatgtaagatgtgactttgctcctcatttgccttccaccatgattgtgaggcctccccagccttgtggaactgtgagtccattaaacctctttcctttatacattgccccatcttgggtatgtctttattagcagcgtgagagcagactaacacaggattctaggcctgtagtttgtgtagttttccattcccctagtggccaccaggatgtgagctgtaccttcacctagcctgcccttaagtcagctcctctaccaactctaccttgctgtttcagattggtaggctgattaaaactctctaaagccagaggaggcctgcattccaccctcagctgagtgtgagccccgtgtgacctaggaagtcagcagcacagactttggggccagatagtctggtggaaccccagcccctgccattgatgttatgtacatcctgggacgtgttacttaccctctctgttcttcagttttctcctctgtgaaatggggagaaatagcacctactgcatagtggctgtgaggattaggtgaattagtatgtgagaacatttcaaacagtccaggaagcactatgtaaatattagctgtcattattttttttgttttcactcaaaacacattacttggttctgatgcttgctagagatagttgaggttcccgggtatatgatctccagattagagaagttacatattaagtgacagatttggtgttgggaggaatctcatgggcatttttttaggatttgattattttctgttgtatctcattgtcgtctttttaatagctgtagacatctaatcctgagctagtgttttactgttctgttactcataaaaattctgaaatgcaggggttaagaatagacaatcaagtcttaagtgctttgcaaaatgaatttattcctttgagaattaaagtgatgtcctgaaggaagtcacagttaatggtcagtttcctttagggaaatattcttgaagaattagagtgctgctctcacatatctttgatggaaaccaaacaactcctgggttaatgtttagttaaatgaaccaaaaaaaaaaaaagtatcactttgcttagttagaagcaaaggaaaatattaattattcgaatggagaaatgtttgaaaatgagaaataattatgttacggtggtgggattacagatgataagtatttttctttttttgaagttgggtaagtatttttctttttttgaagatggatttgccttttaaaaggaaagggggaaaaagcctgaagctgttacagtctgtctctaaactaaattatcttcactgcaatccaacattgtgcagctaagtatcataaaattaagactcacagcctaaaccctctaataggtaagactattctaagacactggtaacacgtctctgaaaagtgctggcgttttgtgctgttagtttcctgggttgattttggtttgagttcacagcagaagtctgttgggtagccagaaaggaagaatcatcacgttgggacacaaatccgagtcctgtctgtcctttgcattcttccttcccccacgtcgtcctggcttggcttcaagcaagtctgtgaggtaaaggttggtggcttagcttcctagggcttctgtaacaaattatcaccatctggtagtttttattgttttggtttttgtttgtttgtttttggcttttgtttttgttttttcgatggaatctcgctctgtcgcccaggctggagtgcagtggcttgatctcggctcactgcaacctccgcctcctggtttcaagcagttctcctgcctcagcctcccaagtagctgggactagaggtgcccgccaccatgcccagctgatttttgtatttttttttagtagagacagggtttcaccgtattgatcaggctggttttgacctccagacctcaggtgatctgcctgccttggcctcccaaagtgctgggattacaggcatgagccaccgtgcccggccaatctggtagttttaaaacaaaagaaatttattatattacagttcaggagcccagaagtcccaaatcaacatgtcaggagggccacactccctccaaagtctcaggggaagatccttcctggcctcttcccactcctggtggcttctgttgttcctcaccctgtgactgcattactccattctctgccaatgtcttcacacggccttcttccctttggctctgtcaaatccccttcgtctttctgaggacaccagtcattggacttgaggcctaccctaaatccaggatgatcttatctcgaggtctttatttaattacacctgcaaaaaccttacttctacatgaagtggcattgttcgtctgggttaatacctgaggttcattgcctcatgccaaggaaatcaaggacactgacacacaaggagtgagtttaagagcaggagtttaataggcaagagaaagaggaaagctctctctctccttcagagagagaggggctcctgagtgagtcttccagttccatggtgaaatgcatggggaggggggggtggtggttaatagatgagcgtggagaggcggtgtctgatttacatagggcccaaatgattggttagataggtgtgccatttacatagtgtaggaagaagatggctgccccaccctaatcttttgttaggcaggtgggttctctacctggccagcgccatgttgcctgcttctttattgcacacctggttgacagaagggaagatggaccctccatgttgaacacgcctgacccccaggtagccatttcctatccgcagagctgccggcattcacccgtgcaagcttccagcttgcttatctatgtctgcagctcgattttacaggctgctctgctagaaaagaaatgatctgggggctgctttttgttaaaacagaaaccttgctgaggactctcttaccctcgctaactgcctaaataatttctttctagttcctgtagcacaaataagattacattctcaggtattggggattaagacttgggaccactccttaagccactgtagctgacctcacagatgtctcagctgaccaccaggcaggtgtttccacccaaggacgcacttccccattccccatggcaccagcaatgtggagtggggagccgcggagcagggagccagcagcttaagtttgaaatccagctcactgttcttgagactggaacctggagggcattattaaatgtctcccagccttggttcctgtcttgtgtaaagtgaaggtgacggtgtctacccctctgggtcacaagaagcatgtgggagaatatgggaaagtagctgacagggtgcacaagttacagcaggaactcaatatgtgtccttgagtctgaatgcagtcatttagggtcctcagtattaactgccttgctctcaggtggatgatgtttgaggattaacaaatctgttgggtgaatccagataaatggggagttgacctttctggatgacacaggttgttgaccatggtttaacatattcaataagttaatataaagagtcttggcagtgcctggtgcggcaaagggacctatatctgtggttgtcattgtcgttgctatggttgccattgctatggcaccataaccttgttgatctgaaccagtagagatgaggctttgaggtggcccctggagatcacagctgaggagccctaagcccacccccagaaatgttgtgaaagtggctgccttctttcctttacctaacttgtgacatccttcagcccaggactcagtacacagtgggccctcaaaaaataggattaactattaactgaaagatcttattccaggtgttcagggaatcagcagaattagcgtgactttctgctaataatatcttcaactgatgtgataagagtagagttctaccagtggccactgcaaaagacacagagcatgcaaaatcctctctccttttatcagaaggaagagcttctccatcctttcaaccttggaccagtaattggtccctttaggagttagtttaagaaaagctatgcatgccttagccagcctgaagtcagacccttaatgggaagctggtgctttattgatgctcagtaacagaacactgctttgagctcaaaataacttctactaagctccttcaacagcttgctccctaggtggctcagtgttttgctgctgtctgaagttgtatatactccagtgaagcttgagtttcttcatggtcatcatccactatcaccagttaatatgggctgaatatccataacatgtcagactcagtcgggatacataaagaagaccctgtacctgcactggggttgtgggtctgagggccattagaactctagatggctgcacagacacaggtgaggctgtggagcaaaggcagagttggtggtgaagggcctatttttaacttttattgccgccatgttgctcctacgatgccattatgaatggtctctgtgagtccaggcagtggttagtgtctactcagaaacctcacaatgtctgtcctcctgggatagaatatgaacagaatccaggtctggggccatggatgttgaacgtgatagtatgtttcctggtatcactaaggtctgatctcttcccgttttcctacagttctatgaacatttctttctaacacaatgttttcttagggctaattttaagttattttttggggactatcatcccttatatccttctccttccaaggtatcccaaagttgatgtgcagtgttactgtacactttttcagcatgtgcaaatctgtctagcttataatctagcatcattttgtgttgttttacattttatataaattgtattacactctacagattcgtttgaaacttgttttctgtccaacctgatagatttgagatttatccatattgatttatgtagatctagttcattcattttacttgttatatatgatgacagtaattggttcgttttcctaatggaggacagctagattgcttccacatttctgctcttttaaacagatatatatatagatagatagacagatagatagatagattgattgattagatagatatagatatatagatatatataacatatatgtgtgtgtatatatacatatatacgtatatgtgtgtgtatatgtatacatatatacgtatatgtgtgtatatgtatacatatatacgtatatgtgtgtatatgtatacatatatacgtatatgtgtgtatatgtatacatatatacgtatatgtgtgtgtatatgtatacatatatacgtatatgtgtgtatctacatatacatatatacatatgtatgtgtgtgtgtgtgtgtgtgtgtgtgtatatatatatatatatatatatatatatatatatatcctgcagtagctcttcttgtgagattctcctatgtgagaattcccctaggtctggggtgtactcagaaggggaactgccagtcatatgtatctttaactttactagctttggcaacttgctctgcaaagtgtctgaaccaatttacattccaccagcagtgttggaggattctacttcctcaaattcttaccaataaatgcttttatcaggttgaccaaaaagattccatgtggctggggtgaaagagcaggtgtttgcctctctgtgattgctgggaaggttaaacaccttttcataggttgattagccatcagtgttgcttcttctgtgaattgtttgtttatatctctagcacctttttcctccttcctgttttggggcatgaggaagagaggtgatgctttactcactgattggtagaaattccttacatattctggatactaattttttgttgatataagttgcaaattatcttctgctgggatttgacattttcataaaatattttgatgaaagaaaaatgagaaatagggaagagcattcaacctttaatagaagcatctgtaaaagggtctatttgttctgctcctgagacaagttggtggtgtgttaaactaatgaatcattacagttcccatatatgcagttatcattacatgagccttttttatttctttctgaggttttattttgctttgctttttttttttttttttttttttttttgagagtttcgctttgttgcccaggctggagtgcagtggcaccatgtcagctcactgcaacctctgcctcccaggttcaagcaattctagtgccctagcctcctgagtaactgggattacaggcacccaccaccatgctcggctgattttttgcatttttgtagagacagggtatcaccatgttgcccaggctgatctcgaactactgatctcaggtaatccacctgtctcagtctcccaaagtgctaggattacagacatgagccactgcactggtcttgctttgcctttttaaggcatcacctttagggacttgcctttgttcttgatggttctccagggtcacttgtttgagactttagtaacaagttgctgataccttaggtaatgatacttacaattacctaagtcccagatgaacgtgaagtctgcccacttccaggtcatgggatcttaagttcttatgacccataaaagacttagactagcttcttgacacctaccagctcatgggtgagtagctcccatcctcccaaactagaagcaattcatttcattacaaacccaccaaaaagcacaattctgtccaccaagagataacggctgttagtaccctgaaatatatcctgttaaactttttctaatacatatgagtatgtgaatatcatataactaaagtgatcataaaatacttattttagattgtaggtttttttacacaatacgtgtctcagaagtcttcctaggttaatgcatacactcctacagtggcagctttaatggctgtgtagtattccattgttatcttgaagattttaaaacatcttttttgttggatatgtggctgatttccatttttttactataaggagcaatctttaagtgaaccttcttgtacatggatgtttgtgaacatccaaaatctaagacctggaattgcagggtgaaagttacactgatctctgcgacttttgttgtataccctacaggtgtttagcataatggggaggggcagttgtctggggctctcatttggaggaaacttactgagcatgaattggggatacgaagatgataagatgatctcactcccttgtgtcaggggctcatggtctagggcagcagtcttcaacctttttggtgcagggactggtttcatggaagacaatttttccatggacccggttgtggtgtggtttcaggatgaaactttccacctcagatcattaggcattagattctcagaaggagggcatagcctagatctctcaatgtgcagttcacaatagggtttgtgctcctatgagaatctcatgccgccggtgatctgacggtaggcagagctcaggcggtaatgcttgcttgcccgccgctcacctcctgctgtgcaccccagttcctaacaggccatggacaggcaccggtccatggcctgggggttgggggccatacactggcagctgggcaggaggcagcaggctcaggacatgaggaaactgaccctaggagggaggaggttggtctccagtttcaggaggtagatgtcaactgcctgaaattctctggagacaatacccctggctcccctctccacacatcagccctctgtctgaatgatataacatgattcccttgactaaaagcacagcccttgctgtatctgaggtgagccacaaaacctcttgcacttcagtctccacccctgttagttgtggagaataatacctgtagcttgctctgcttcacagccatgagatgcaaggcacataatggatggaagagtgctcggccactgtgaagctctgtgtaaatgttatatacacagtactcccaatgccgtcctcagagcgtgcacgagggcgtctgatgaataccagctctcagaagatgttaaagaggatgctggtctggacgtagtggctcacgcctgtaatcccagcactttgggaggccaaggtgtgtggatcacctgaggtctggagttctgagaccagactggccaatgtggtgaaactccatctctactaaaaatacaaaaattagctggacatgatggcgggtgcctataatcccagctacgtgggaggctgaggcaggagaatcacttgaacccgggaggcggagattgcagtgagccgagatcacgctactgcactccagcctgggcaacggagcaagactccgtctcaaaaaaaaaaaagtggatgccggtcctgaaatgagacctcccttctgaaccggagtgtggacagcccaggaacccaccgccgcagcttaaaatcctcagctgaacatcactgggggagcacatgggctctgcttgcttatggcctgggttcaaatcccaggcctgccatttccagctctgtaacctcagacaagtgactcaaccccctgtaccgcattttccacatctgtgacatctgtgacttggtgtggtcaatgctcaatacatgtaagcttttattattgttgttgttgtttacaactttttgttgttgttgttttaaagacagggtcttgccctgttacccaggctggaatgtagcggcatgatcagggctcgctgtagccttgacttcccagcctcaagcaattgtccttcctcagccccacaagtacctaggactacaggcgtgcaccaccatgcccagctaattttttttttttttattttagtagggatgaggtcttgccgtgttgcccaggctggtcttgaactcccgggctcaaatgatcctcccactttggtctcccagggtgttaggattacaggtgtgagccactgtgcctggccatatttgcagcttgttaatacttacaaggaaactgttagaacagaaaaagaatcattccctcagccatttaaaagcatcctaaaatcaagttcttgttttaagatagttttcattcattgttctggtacttcctaaatagtttcttcccagtaaaagtgcccccactttggtggtttaattataggccatgaggatttgctttttccgtgtaaggttggaagaaaaagttggtttgctgctataggaaatgagtagaagctctgttgccctcgacagccttgtggagttgtcctggaagcctatgtccagagctgtctcccaggtcatcctattgctgcactatggccgactcccatgcagagagggtccttttataaaaacctaaacataaccatgttgagagagcagtcatccctgccgaacctttgctgaagccagttgcctttgctcttagatgatctttgtgcatccaggggttctagaacgttagacccaagagtgtctggtcctagctttgggggtttcttggcctaggatgcaatattttaatggataggatcaacatcagagtaaattttaatttttctaaataaagacattattaaaagttaccagctgagctctgtggttcatgcctgtaattccagtactttgagaggccgaggcaggcagatcacctgaggtcaggagtttgagaccagcctggttaacatggcaaaaccccgtctctactacaaatacaaaaattagccgggcatggtgctacatgcctgtagtcccagctacttgggaggctgaggcaggagaatcgcttgaacccaagaggtagaggttgccatgagccaagattgcaccactgcactccagtctgggtgatccgtctcaaaaaaaaaaaaaaaaaagttaccattggccaaatcaccattttatcaaagaaaagtttatttttacacccaccctcctcaaaaaatagaaaaagaaaggaagcaaagacataagcctggtacatttccaaagactatataaattaatttcatgtaaaacttcctcctttgttcttgtttttcgccggtgcgtccaaggaatcacagacttcatgtacacaaagaaaaggagataagatgacttggtctgagtggcgtggtagatcacactcaggcaagactggagcatgaacggttctcctgaaaattccttctaggctgctagtcagtgagttgtttaaactgactccaatccttttgttgtgcagatgcaaactgtgatgcagttgaattatgtgatttgttttctaaattgttcataaccaaaaaacatcgattcatttttatttatttattttttattttttgagacaaagtctcgctctgtcgcccaggctggagtgcagtggcgcaatctcggctcactgcaacttccatctcctgggttcaagcgattctcctgcctcagcctcccgagtagctgggattacaggcatgtgccaccacactcagataattttgtatttttagtagagacagggtttcaccacattggtcaggctggtctcgaactcccgacctcatgatccacccgcctcagcctaccaaagtgctgggattataggcatgagccaccgtgcccggcccaattcattttattaaataaagaaacatttatttagagtttaaatgtctgatcttgaggttgcgtcagggtgaagactaagctgctgtaataaagacatatgaaattagtggctaaggaaagagagaagtcggtgtttcctcccatgtagcagtccttggtggggtggcatggctccatgtggtcattcagggacctgagctgcttccatcctgatgctctgttgtttttcctgagtgctttcctggtttgcttggtggaagctggattgctactgtgtgtgcatggaagtggaggaagaggatgaggcaccaaagctctgtgtcttgaggccaagacccataagcatcacagcactctgtgcacagcccactagcccaagcccagtaaagcagttgcatataactgcaagagaggcaggcaaatggagtccccagctggaggccacatgcacagctgaaacttgggggtggagggaggaggggttcctatcactaaaagaagaggagaatgactacttggggacaaagagcagattctttgtcatggacatgaagatgtttttaatccattctttctgtctagcagaatgggaaaaggaaacccctgcttctagaactgttccaatgttctgcccatcttgccagactctccctatatttggagggcaaagattcaggcagacatctcttggtgtaaaagtaaatttatctggctgggtgtgggggcccacgcctgtaatcccagcactttgggaggccgaggcagatggatcacctgaggtcaggagttcatgaccagcctggccaacatggaaaaaccccgtctctactaaaaatacaaaaaattagccaggcatggtggcggctgcctgtaatcccagctgctcgggaggctgaggtaggagaatcacttgaacctgggaagcagaggttgcagtgagctgagatcgcaccattgcactccagcctaggcaacaagaatgaaactccgtctcagaaaaaaagagtaaatctatcccacattggtggtttccctgaaggtctggtacaatggaggattccaagcctttctctttttcccaaccatggctcttccactggagtatttcacagggagatccaaggacactgtgggaagaagatcttggatccccaaagcccaaatctgatcgcgttgcccagtgttagtgatgacagctcttcctggcatatgttggttgggtggggtggtctaaggactgcaggatgttttagagcctaaatttaccaactttcggcccctgcttgatgatgctcaacagaacgaacaaagctgtagattacttgtccagatggcctctttatttttagattggtgatcagtttccagcgtctctttatttcttcaccatgatggtctgaatgatgacttcaatgaagggcaaactcaggcactctaggaaagatacattactcagcgtgttattgcctgacacgttctgggaaatcacaggacaatcatcttcatgtgcaacatgtgggtttttttttaatttatttgtttgtttttggcacatttacagttaaattccccagatccaagaaaatgacttcccagttcctggggaaaataaattacgaatggagatggaacccagctcctctctaccacacggggcccagaacatcgtgttctctgctgcaaaactgcatagatcaggttggccacagaactgcaggtgcctcactgatccacattcctcagttaaggaccaagatagaaacctttatatatactctcactgagggaattaattaatgtctgtgttagtttcctagggctgccataacaaattgccacatttcggtggctgaaaacaatagacatgtattctctcacagttcagggaaccagaagtccaaaatcaagagactggcagaaaacaaggtggttccttccatcccatgactccctcctagtttctgctggtgttcagcagtctttgccagtctttgctttgacgatgcattattctaatgtctgcccctgtcttcacatgaccctcttccctgttcctccaattttcaaatctccttcttcttttttaaaaaattatagataagatctcactctgttgcccaggctggagtatggtggtgtgatcttagctcgctgtatcctcaaactcctgggctcaagcaagcctttcaccttggccccccaaaatgctaggattacaggtgtgagccactgcacctggccttccctcacttttctttcgcaagtacatcagtcgttgaatttagggcccatcctaaattctagatcaccttatctcaagatcctcaacttaggtatatttgcaaaaactctattttattttcttttccttcttttttttttttttttgagacagtcttgctctgtcacccaggctggagtgcagtggcgcaatctcggctcactgcaagctccgcctcccaggttcacgctattctcctgcctcagcctcccaagtagctgggactacaggtgcccgccatcaagcccagccaattttttttgtatctttggtagagacagggtttcaccatgttagctaggatggtttcaatctcctgacctcgtgatccgcccgcctcggcctcctggattataggcgtgagccaccacgccctgccaaatttatttattttcaaataaagtcacattcacagataccagggattaggacttgggcatgtcttttcaagggatgcaattccacccactacaatatcatagcaaacgtgcatcaaaaaggttaaatctattaccaccgatcccatgttgtgttgactgcaaaggcgtacggcatcaagccttggaaatgtaacaggcccatttttcgcagttggaaaatcagaagtgctagaaagagagctggctcatcctgtagggatgggtggtgggtcgcctcaggccctcctttcattcccagggaccccgtttgcacagctgcgtgtggagccggctagcacgttgtcagcaacacttctttccgtgtgcttgctcccttagtctctgtaactagcaggtggttgtggtgcctgtcattcatctcccagggctggcttgataaacgttattatacttcttgatgggtaccttctggcgtatttaccgctttgtaactttgctgtttattgtggttccttggagcccaataaaagcaagataagaaaaagcaagcaagaacagggcaggaaaagtcagaactgtaatttagtcatgtaaggttcaattggatgcgtttttcctttgcccccctgccttcaccgctgggctgttcagagccaggctctgctccacttcatccccatcccagtgacattacaccctccacatccccatcctttctggagtgatcagtatcttcttcagtgcatgatggaaaggggaagattttagttcatatcagatgttcagaatctttgtaggaaattgaaaaaatattaaacctttttttttttttttttttttattatactctaagttttagggtacatgtgcacattgtgcaggttagttacatatgtatacatgtgccatgctggtgcgctgcacccactaacgtgtcatctagcattaggtatatctcccaatgctatccctcccccctcccccgaccccaccacagtccccagagtgtgatattccccttcctgtgtccatgtgatctcattgttcaattcccacctatgagtgagaatatgcggtgtttggttttttgttcttgcgatagtttactgagaatgatggtttccaatttcatccatgtccctacaaaggacatgaactcatcattttttatggctgtatagtattccatggtgtatatgtgccacattttcttaatccagtctatcattgttggacatttgggttggttccaagtctttgctattgtgaatagtgccgcaataaacatacgtgtgcatgtgtctttatagcagcatgatttatagtcctttgggtatatacccagtaatgggatggctgggtcaaatggtatttctagttctagatccctgaggaatcgccacactgacttccacaatggttgaactagtttacagtcccaccaacagtgtaaaagtgttcctatttctccacatcctctccagcacctgttgtttcctgactttttaatgattgccattctaactggtgtgagatgatatctcatagtggttttgatttgcatttctctgatggccagtgatgatgagcatttcttcatgtgttttttggctgcataaatgtcttcttttgagaagtgtctgttcatgtccttcgcccactttttgatggggttgtttgtttttttcttgtaaatttgtttgagttcattgtagattctggatattagccctttgtcagatgagtaggttgcgaaaagtttctcccattttgtaggttgcctgttcactctgatggtagtttcttttgctgtgcagaagctctttagtttaattagatcccatttgtcaattttggcttttgttgccattgcttttggtgttttggacatgaagtccttgcccacgcctatgtcctgaatggtaatgcctaggttttcttctagggtttttatggttttaggtctaacgtttaaatctttaatccatcttgaattgatttttgtataaggtgtagggaagggatccagtttcagctttctacatatggctagccagttttcccagcaccatttattaaatagggaatcctttccccattgcttgtttttctcaggtttgtcaaagatcagatagttgtagatacgcagcattatttctgagggctctgttctgttccattgatctatatctctgttttggtaccagtaccatgctgttttggttactgtagccttgtagtatagtttgaagtcaggtagtgtgatgcctccagctttgttcttttggcttaggattgacttggcgatgcgggctcttttttggttccatatgaactttaaagtagttttttccaattctgtgaagaaagtcattggtagcttgatggggatggcattgaatctgtaaattaccttgggcagtatggccattttcacaatattgattcttcctacccatgagcatggaatgttcttccatttgtttgtgtcctcttttatttccttgagcagtggtttgtagttctccttgaagaggtccttcacatcccttgtaagttggattcctaggtattttattctctttgaagcaattgtgaatgggagttcactcatgatttggctctctgtttgtctgttgttggtgtataagaatgcttgtgatttttgtacattgattttgtatcctgagactttgctgaagttgcttatcagcttaaggagattttgggctgagacaatggggttttctagataaacaatcatgtcgtctgcaaacagggacaatttgacttcctcttttcctaattgaataccctttatttccttctcctgcctgattgccctggccagaacttccaacactatgttgaataggagcggtgagagagggcatccctgtcttgtgccagttttcaaagggaatgcttccagtttttgcccattcagtatgatattggctgtgggtttgtcatagatagctcttattattttgaaatacgtcccatcaatacctaatttattgagagtttttagcatgaagggttgttgaattttgtcaaaggctttttctgcatctattgagataatcatgtggtttttgtctttggctctgtttatatgctggattacatttattgatttgcgtatattgaaccagccttgcatcccagggatgaagcccacttgatcatggtggataagctttttgatgtgctgctggattcggtttgccagtattttattgaggatttttgcatcaatgttcatcaaggatattggtctaaaattctcttttttggttgtgtctctgcccggctttggtatcagaatgatgctggcctcataaaatgagttagggaggattccctctttttctattgattggaatagtttcagaaggaatggtaccagttcctccttgtacctctggtagaattcggctgtgaatccatctggtcctggactctttttggttggtaaactattgattattgccacaatttcagagcctgttattggtctattcagagattcaacttcttcctggtttagtcttgggagagtgtatgtgtcgaggaatgtatccatttcttctagattttctagtttatttgcgtagaggtgtttgtagtattctctgatggtagtttgtatttctgtgggatcggtggtgatatcccctttatcattttttattgtgtctatttgattcttctctctttttttctttattagtcttgctagcggtctatcaattttgttgatcctttcaaaaaaccagctcctggattcattgattttttgaagggctttttgtgtctctatttccttcagttctgctctgattttagttatttcttgccttctgctagcttttgaatgtgtttgctcttgcttttctagttcttttaattgtgatgttagggtgtcaattttggatctttcctgctttctcttgtaggcatttagtgctataaatttccctctacacactgctttgaatgcgtcccagagattttggtatgtggtgtctttgttctcgttggtttcaaagaacatctttatttctgtcttcatttcgttatgtacccagtagtcattcaggagcaggttgttcagtttccatgtagttgagcggctttgagtgagattcttaatcctgagttctagtttgattgcactgtggtctgagagatagtttgttataatttctgttcttttacatttgctgaggagagctttacttccaactatgtggtcaattttggaataggtgtggtgtggtgctgaaaaaaatgtatattctgttgatttggggtggagagttctgtagatgtctattaagtctgcttggtgcagagctgagttcaattcctgggtatccttgttgactttctgtctcgttgatctgtctaatgttgacagtggggtgttaaagtctcccattattaatgtgtgggagtctaagtctctttgtaggtcactcaggacttgctttatgaacctgggtgctcctgtattgggtgcataaatatttaggatagttagctcctcttgttgaattgatccctttaccattatgtaatggccttctttgtctcttttgatctttgttggtttaaagtctgttttatcagagactaggattgcaacccctgcctttttttgttttccattggcttggtagatcttcctccatccttttattttgagcctatgtgtgtctctgcacgtgagatgggtttcctgaatacagcacactgatgggtcttgactctttatccaacttgccagtctgtgtcttttaattgcagaatttagtccatttatatttaaagttaatattgttatgtgtgaatttgatcctgtcattatgatgttagctggtgattttgctcattagttgatgcagtttcttcctagtctcgatggtctttacattttggcatgattttgcagtggctggtaccggttgttcctttccaggtttagcgcttccttcaggagctcttttagggcaggcctggtggtgacaaaatctctcagcatttgcttgtctataaagtattttatttctccttcacttatgaagcttagtttggctggatatgaaattctgggttgaaaattcttttctttaagaatgttgaatattggccctcactctcttctggcttgtagggtttctgccgagagatccactgttagtctgatgggctttcctttgagggtaacccgacctttctctctggctgcccttaacattttttccttcatttcaactttggtgaatctgacaattatgtgtcttggagttgctcttctcgaggagtatctttgtggcgttctctgtatttcctgaatctgaacgttggcctgccttgctagattggggaagttctcctggataatatcctgcagagtgttttccaacttggttccattctccacatcactttcaggtacaccaatcagacgtagatttggtcttttcacatagtcccatatttcttggaggctttgctcatttctttttattcttttttctctaaacttcccttctcgcttcatttcattcatttcatcttccattgctgataccctttcttccagttgatcgcatcggctcctgaggcttctgcattcttcacgtagttctcgagccttggttttcagctccatcagctcctttaagcacttctctgtattggttattctagttatacattcttctaaatttttttcaaagttttcaacttctttgcctttggtttgaatgtcctcccgtagctcagagtaatttgatcgtctgaagccttcttctctcagctcgtcaaaatcattctccatccagctttgttctgttgctggtgaggaactgcattcctttggaggaggagaggcgctctgcgttttagagtttccagtttttctgttctgttttttccccatctttgtggttttatctacttttggtctttgatgatggtgatgtacagatgggttttcggtgtagatgtcctttctggttgttagttttccttctaacagacaggaccctcagctgcaggtctgttggaataccctgccgtgtgaggtgtcagtgtgcctcccagttaggctgctcgggggtcaggggtcagggacccacttgaggaggcagtctgcccgttctcagatctccagctgcgtgctgggagaaccactgctctcttcaaagctgtcagacagggacacttaagtctgcagaggttactgctgtctttttgtttgtctgtgccctgcccccagaggtggagcctacagaggcaggcaggcctccttgagctgtggtgggctccacccagttcgagcttcccggctgctttgtttacctaagcaagcctgggcaatggcgggcgcccctcccccagcctcgttgccgccttgcagtttgatctcagactgctgtgctagcaatcagcgagattccgtgggcgtaggaccctctgagccaggtgtgggatatagtctcgtggtgcgccgtttcttaagccggtctgaaaagcgcaatattcgggtgggagtgacccgattttccaggtgcgtccgtcacccctttctttgactcggaaagggaactccctgaccccttgcgcttcccaggtgaggcaatgcctcgccctgcttcggctcgcgcacggtgcgcacacccactgacctgcgcccactgtctggcactccctagtgagatgaacccggtacctcagatggaaatgcagaaatcacccgtcttctgcgtcgctcacgctgggagctgtagaccggagctgttcctattcggccatcttggctcctcctccaaaaatattaaacttaaaacaatttcttcttttaaaatatgtattatgagggatgttgtagtatagccactgtagaatgagagaaaatattatacagatctgaacatgtagcaggcgtggagcgctcaggtttcacgggtggccttggaggttctggctctgatgctacagagacagccaagtataaaggggtccctgagaacctccaacctggcctgtgcactgggaggagtgtgcgctgtgggggagccatggaattttgtgctgtctgcagtgggaaggagcttggcctctcctcttccggggcggtaaccggggattcagtctgtgaggcgggaagcccactaggaggactctcactttgctgagtctctctttcccttctttcttcttcacccaataaaccctgtccttctcacccttcaaagtgtctgtgagcctaatctttcatggtcatgtgacaagagcccggcttttagctgaactaaagagaaagccttacagcactaccatccagcgtcctcctccttcctgccctggattctttagaaatgactggaaactctctccagaaggtgttttctgtgatggcataaatggatcactggaggcccagggccagtgctctctctctgctgtgcttccttggaattctggcccccagccctttcctgaacgcgtcatctccttgagggtaaaaggagccagagaacactatcatcgcagatgcttcatgtgaattgttccatttttaagacaaaggacgacagttggccttaaaaataaatctcatttgtgtttcttttggttgtggagaagtaaagaattttcaaaacgggtcctttttatatacaaacgtttgtctaaatagagcatctttagatcttaaaatgaacagcaaagcgagcactcggagatgcttctgttgtgggctttggtagacagagagagaggtgaaggtcccttctatgcctttttctctttcaaatagttgtttttattgtggtgaaatatccatagcataaaatttaccacttttaactgtggaatgtacagtgtagtcaggtttagcaccttcataatgtcatgtgctcatcaccaccatccatctccagagcttccttgtcctccctgaatgaagctctgtactcatgaaacaccagctcctcattttccctcccctccagcccctggtaaccaccattctaccttctgtctctatgaatctgactgctccagacacctcacataagcagaatcattcagtatttgtcattttgtgactggcttattatttcacttagtatgaagtcctcagggttcattcatgtagtcacatgtgtcagaattttattcagttttaagactgaatagtatctcgctgtatggatataccgccctttgtcgattcactcatcaatggacacttgagttgtttgcaccttcccccgcttcccactgaagccttcctctccatcagttcccggctgtcgctccctgcctctccttggtgatcgcctctggaacagaattttgctgttaggagccactcctgtcaacaggatttcccagagtgtgttaaaagaaaaagcaaatggataatagctctaaataagaacttgctttgggtaagctttggtgacatctgcaagaaaaaaaaaagtggcctgggaaacagggagggttcctggcataataaacattttcttaaacctttatgcaaatcccagattagtagatattgcgggagtcagtttctaaaagaaaacttgatttccgaaggccatgcacagttattctgtttctccatgtgttttgtttgtaagaggaaaacagtggaatagagaatgtttgccacagccaaggttttctctagtccctttggtaggtggaaaccaagtgctggatgaaattgtgtctggatgctgaataaagacatggtttgctgaattcattttggcagcatacactgaggacaaagcaccagtgtacaaccacactacttaattaggattctctgaagacatgccaatagcatctgctcagaagtagtgctgcaaaaagattagtcttgattttgagtatgacttgatttagccagatgcataggcccacttctttaaaagaaagtccaaatttatcttctgtgttctttgagggagtgacaacctagaatcagcttgaaacataaaatgtgcaaagtaaaatttttacaattatgattgcacttctaggatttagtaaacctttaaccaccaagagactggacttgggggtgcgttgcctgtgataggatgccaagttgtttcttggcagaaacatggagattgttaaaccaggatggtaaagagtgactttgtctgtgtcagctactctgaagctatccctgagtcccctggaagacataagcatcccttcctccatgaccccaaggctccttgtgaataataccacattagagcacttgtcacgtcatggtggaattttcatgtgtacatggggtttcatgtacacacgtgtgtatgtaaagggcacagactgcattgttttattccaagcatggggccaatgtattgcagtaacaaggacaaccttttattagatggctactgatcacagtgagaaaggcattagcaccatttcacaactgaggaccaagtagtttagaattccctctggtcactcaactcataagtggacccatgagacctgtgggactccaaagctggtgcttttctcattagaacatgatttccatgttggtgggaatacaccatatgtctcataaaagagttaattatcaaaatcacaatgacattcttcacactcactgggatggccatgatcaaaaaagataatagtaagtgttgatgaggatgtggaaaaattgaaaaccttgtaacttctggaatgtacattggtacagctcctttggaagagtatttggcagtcactcaaaaagttaaagttgccataagacccaacaattcctcttctaggtatataccgaagagaatgaaaacatatgttcttacaaaaattaatacaagaagggtcatagcagcatcattcatagtagccaaatgtccatcagctgatgaatggctaagtaagtgtgatatattcgtgcagttgaacatgattaggcaacaaaaaggaatgaaatacaacacatgctgcaacatagatggacctcagagacatcctgctccgtaaaagaagccagacgcagaaagtcacatattgtatgattccatttatgtgaaacatccagaataagcaaatctgtatagacagaaagtaggttagtggttacctagggctggggatggggagcatttgaaggggattgaggaggaactgctaatgactttgaggttcctttttgagatgacaaattgtgataatgggagcacactgtattaaaaaccatcgaactgtatactttaagtagatgaattgtctggtatgtgaattgtatctcaaagctgtatataaaaaataattaatgaggccagatgtggctgctcatgcctgtaatcccagcactttgggaggctgaggtgggcggatcacgaggtcaggagatccagaccatcctggccaacatggtgaaaccccgtctttactaaaaatacaaaaattagctgggtgtggtggcacgtgcctgtaatcccagctactcgggaggctgaggcaggagaatcgcttgaacccgtgaagcagagattgcatgcagtgagctaaaattgcaccactgcacttcagtctggtaacagagtgagactccgtctcaaaaaaaataataaaatgaagttaaaccaaagaaataccaggagacagtaacattaaagaagtctgaaagagctcatacgaatgtataaggaccccagtagataaactggcaaaataattctaaaagagagcttacagtagagggaatataattaccacacagacaaatggaaaacattctggttctttaacaaagatattaaaattagaaaaataaagtactgtaatatttctcacatatttaattagcaaagcattttaaaaatgattatcaattgctgggaaagagagcaatatttttctatgtttcaggttatatcgtaaattgatactactcttagaaatcagtggccatatatatcaagagttgtaaaacatttgtggctattctatttttagaaatctcttctaaaacatacaaaaatataaaaatgaaagactaatgatgcaaattatgactcatttatgtggtcatttaaaaattagaaaaataaaaattcagttactaagattttaaagttatatgtactgtaagtataacttacagtaaaaaacaggcaagtttaaaattactgaaaggaaataattaaaatgacccagcgatggagttgtggtggagttctgggaaattttttcatttcttattttgtaatgcaattacttttaagttttaaaacatttttataaatagaccttatatttctaagagttatgcttcctagaatattaagtttttgcagattatttcaatcggtaaaaatcaaaagatgccggctctcttggctgacctttaaattaaaatactaatgaagcatttattaccataagagaaaaatatgcttaaaacacctttcattaattgtacttttgccaaaccactctagagttgaatgattctctttctttcccaatttacatagttctgtgggaaaaaatcggacatacagtgagttaagtggagaattgttgcaagcaagccatgaactgccttttaaaagcttgtccttttgaggggaagagacatggattctccacttcatcccctcagttaaacaaaaatctgagccttgcatatttaaagataaaaatatacttaatttttaaagttattgttttggtccagtttagaaaataccacctcattttctcctcccttatgtcttgatattgatcccaaagaatgtgcgtcaaactaagaaagttaattttcatgtagcaacatctggttccttagccaattcagggaactcttgagtgcttatgctcagagcttttgctgctgtttctagattccaccctctgttagcttctcacaagcagtccggtatttggtagagtgtggggggccgggggctcatgaagtcagattccaacgtgcagggtttgtttgagatgcctgtaggatcaaccaggtttcacctctggatgtatgtttaattcagtggacgttgtcattttgatggcacatacccttcagtaaaaagaggttaaaagtattctaaaatgaggtggtggattatctgtttgggtagctacatggtctctgaagtctcttccattttaagataaaattgccaaagacagtttttacaagtttggaactttctgagtgggtgatacgcattagggttttggtggtgctgattattgcatccagaggttggccctgacttctgtcgtctgctggtcttggaatacattgaagcacaccgattggagcacaccgactgaagcacaccgattggagcacaccgattggagcacactgactgaagcacactgattggagcacaccgattggagcacaccaattggcttttgcttttggagcttggttattgtgcagtgttcccacttacctaatcatcactttgttggtggtggagtggagggcctcactctggttccaagcaagtcattagaatgatctacaatttgcagttctaaaatcaggaaaacttggggtttctccaaagcctgcattaaacagaactttttctttcttgaaggtccagatccatacttaaattttacttaaattttaatgagtaatattttcccatcagtggcctaacgcactataaattatgtatgctgcacattaaattcatttttattttttcacaaactggacttaatggcatttgttgttttgtataccctatacgatagaaatttgttgctgaaaaggaattcaggggtcctccagatcactggtttccaaacctgactctttaggaagaaaacaaacaaaaatcctccagtttcgttatggacgtgatgaatgagacacccacggagtatggcccaggaatctgttctcataaaggtctccaggaaggttgggaaggaggagggaagagcgtagagctattctccctgaaaagaaataggccaagagttgattgttgtgttagctggtaatgggtacttagggatccattattctctctgctctttgcatgtatttgaaattttccataatgaaaagacttttaaaaaagattaaataacagcttcccaggtgatcctgaaaatcagccaggtttgggcagcacaatcaatccgcctctcccccttaacaggtgagaacaggaaggcgaacgaggccatgcagtttgcgtgaatgaagaactcatataggatctagaactcctgtttctgccccataggcctaagcccttaactcctcatggcctcctcagactaatcattttgctgaccttcttagcattttaaaagagaattaataaatctgacttgtatgattcacttacttttttttaaacacagaggagtgttgagtgtttttgagatgtttttctttcttcacacatttttctaagatccttttaaacccattccattggacttcaaggtagctattggcttttcaaacataggttacggggctactactttgccgctagttagtgtgtgaggccactggtaaatgaatgaatgaatgagcagtaaaggtgctgaaaagtgtaatgcgtgtctatatgaagcagtgtctattgagcaaaccggagagaccagctccatcctggaaaattaaaacaatggtactgtgactttgcctattgccaatcatcgatcagtcctgtcggtctgacttaaccttctaaagctctttaccacagtgtatagataagttgcctgtcatgtaaatatatcttattgattttgtcaggcagctggccagttttcttaaaaatgtgtcaaattgtctgaatgatttgaccagaaaccccgagagtcaacgtgaggaggaaagaaagaggaagggaacggggaaaaaaagggaaggaaaaagacaaataccacctaattgagactaaaggaatgatcactggggctaccatggcttttgtttggttttggcaaggctttattttattttttttttactgtcagtgaaaacaagaatttgtattgcaggaaaaacaaactaacaagtgttttttcctactgtactctcaacacaaagtgcttctggtcaccaaaatgtggagagatgttgccccccacccacacacaaagcaactctccagcagacaccaaccgggtgtcctatagttcagtgtaattctgagattatctacctggagatagcatcaggtccgacaagataagggttcagtcccacaacactgccccccaccatccctgcttcagacactactcataagtacaggttacccatagctgatgtccaatttagctacaaattgacccccttttagggttctcttgtttgctaggacagctcgcagaactcaggaatgcacgttacttacatttaccagtttattatcaaggatattacaaaggatacaaatgaacagccaggtggaggagatgcacagggcaagggatgtgaggaggggcccagagcttccatggcctccccggacccaccatcaacagagctttctgaaccctgaagtccagagacttttatggaggccttctcacacaggcatgactgatgattcactccatctccagaccctcaccccttcctggagactggggagcagtagagctaaaagtttcaagcttctagtcatggcttggtctttccagtgaccagcctgtatccaggaacccacccagagtcaccccatgataacaaaagacactcccatcacccaggaaattccaagggattagctctgtttcaggatgttggaaatgagtgcttgagtcgcaaaggaaataacactcgaacagaaaatatctcagcaaagcaaatttacttctgcagaagggtgcttcctgtttcagtcacgatcgcaagagcacaccgaacaagggaaggaaggggtttttaaccctaactcagttcctgtctctgtgtccttcccctattgattggggttggactgcacaacctaagatctaagctgacccgactggctactgtttgaaattgcggagggctagttgggtgggaaaggagagactgtccattacagtacaaggcatgtcagggtgcagcaagagcaggaagggtggtttaaatactagaaacgagagtacaaggaagttgggcttcagaacaaagaacaaggacattacaagttaaaccctttgaagaggaattttatcatccctgacaaggaactggggtcaaagaccaaatattagaacaaaaaagtctcctaacatccctgttgctcaggaattacaaagattttagaatctctgggccacgaactgggggaggagtccaagtgaatatttcttattatatcccagtattgctttatttttgttatagatttatcaagatacaattcatgtacccataagcttcacccatttaaagtgtatagctcagtgattttttgtgtatgcctagagttgtacaaatgctaccataatctaattttaggatatattcatcacccctaaaagaaactctatacttactagtagtcatctcccttttccccattatcccgacccttggcaaccactaatctactttttgtctctatggatttgtctattctggacacttcacataaatggaataatacagtaaatggccttttgtaactggcttcttgtattgtgttttcagggttcatccatgttgtagcatgtcatagtgcttcattgttttaatggcctaataatactccattgtatgggtgtaccacattttggttatccatcatcagttgatggacatttaggttgtctctacattttggctattgtgaataattctgccatgaacattacaggtttcatgtggacacatgttttttgttttcttgggtctgtacctaggggtagaattgcagggtcacatgtattaagcattttgaagaactggcagttttctgaagtggttacaccattttatggttcctctagcaatgagttgagggttctgatttctccacatcattgccaacattcatagttacagatcttcttgattctagccatcctcatggatgcaaagtggtacctcattgtggttttgatttgcgtttccctatggctaatgatgttgaacatgtttttatgtgtttattggtcattatatatcttctttggagagcatgtattcaaatccttggtgcatttttataatggatttatttatcttaccattgatgggaaaaacacttgttttattttacacatatctcactttgtgagtaaaaaaaaaaaaaaagattggaggccagattcagtggctcatgcctgtaatcccagcactttgagaggtcacagtaggcagatcacctgaggtcaagagtttgaaaccagcctggtcaacatggtaaaaccctgtctctactaaaaatacaaaaattagctgggcatggtggcaggcgcctgtaatcccagctatttgggaggctgaggcaggagaattgcttgaacccaggagatggaggttgcagtgagccaagaccacaccattgcgctccagcctgggcaacaagagcgaaaatctgtctcaaaaaaaaaaaaaaaaaaaagactggaaaaaataacaaatattttaaacacccaagagacattattaacagtttgattgacttatagttccatgtaacctaattttagggctcattctggtagtggaagaaacctgacattggtaatatataaatagagtgcacacacagaatcctgaatccttttaatgcctattaggatgggtgctaagcctgctgggagaatactgagttagtggagataactgatttacattgagaacgttctgatatttgtgattttctcatactatataaattagagattcatatgtgcaattgagaatatttcactgattctgttggaggtttttttttttttgtctttagctaagttgtatggaaactcaagagataagtacctcatttgtggtattgtgaatttttccaggggaagaaaaccttttttctcttacaaacagttgaagaaaattatcttttctgtttttaaattatcataattgggtttctccatcacagatttgtcaaactatagagtatgtataaagtcatgtttattcatttgatattctcaacataagtattctaaacttgattatgttaattcagaagaatagaacattaagcttagaattaggcaaatatatacaagttgcaattgtgtacagggattgcttatatttccaggataaaatcaaatcttatccccaaatctaattagcagctgttcattggtgtatttgacatacagcagccgacttttctcacctcaataaaccactacatcatcaacagatgcagcggagccttgaccgctaattagagttctctgccagaatcctagagcctgatgttggctctgtgaagagttgagtcaaggacatcccagcagtggtttttggaggaaggaaaattagaggttaaatgcatagccgtctacacaagagagatggttatttttttagatgcacagaagtggatctcagcattataaatacttttattaatcagtgctctttgctactttaaatctgtttccagactccactagtttcctaaagctgctgcagccaattaccaaactcgttttcttaaaacaacggaaatttattccctcacaattctgaggctagaagtccaaaagacacccatcaaggtgtctccaggccatgctttgtgcgaggctctagggaagaatccttccttgcctcttcctggcttctggggcctcccagcaacccctgtgttccccagcttgcagctacatcactccaatctctgcctccgattcacatggccatctcctctctgtgtatctttgtgtgtgtgtccttttccttcttgtaaggacaccagtcattggatttagggcccaccttaatccagtatgacttcatccttttttttttttttttttttttttttgagacagagtcttgctctgtcacccaagctgtagtggcacgatctctgctcactgtaaccttcacctcccagattgaagggattcttgtgcctcagcctccctagtagctaggactacaggtgtgcaccatcacacccagctaatttttgtatttttgtattttcagtagagatggggtttcaccaagatggccaggcttgtcttgaactcctggcttcaagtgatctgtgtgccttggcctccccgagtgctgggattacaggcatgagccaccatgcccagctgacctcatcttaacttaactaaattgcacctgcagagaccctatttccaaataatatcactctctccgattccagctggacgtgaagtggaggggcagggggttgggaggatgggacacagaaacctggccactccatttttgaggtacatttttaatgattgtagattttcatgtatgctacctatcaaacaagataacgacatctcacagatttgggggcgtatgtttgtatatttccggaaggactctaaaaatccagatggaaattgatatttttgaggcatctaccacacgtgaggcagttttgcatcaattatctcctttaattctgtgaagttactttctatttattctggttcctcatataattgcaatttgctgaatttgttggtgagttcttaaaaatgttaccgtttcctacctgttaccatatctgtgtttatctcatgccaaatatataaataactcttcctcagccacttaacagctaaatttgggagagattctgaaactacatgggcctcagtttcctcatctgtaaaagggggccagcaattcatcattaaccttgtgacattgtggtggctggcaaataccgtgtcaaacaggaagtgttccacaagtggcagttcctcgttatgcttttcttaaagctcttttggaggtgtgcacaaattcttattctttttgtgcttactgccaaaaagggtttagggatacatgtgtcgtaccatcccattttccagtagagacattgtaattcatgggcatatcagttaagaattggatgcagctgtatacagtacaaaaattccaaataacagcagactgaatgagaatgtttatttttccctcatgtgaaaggagtagggagggggtgggccagggcttcagagcagttccacagtcatcaggaaccaggcttctgtgtctctgttgtaccatacaagcccagggcttccatgcacagtcccctctgaccccaaatggctgtgtagctccagccctcgcgtttgtgatgcatgctaccaacatgtaaaaggacaaccaggatgcctctcccagctgagtggcctccctctaggcagcttttcaggaagtttccacataacacttccactaatatctcatttgttcagtgaccatgtttagctgcaaagaaggggaaaaatgttttcttctgtttcaggcctcggtgtgcccagctcaaatgagggttctcttatgaaggagggaggggagtggatgtcggggtgggtagccagcattctgtgctgtaatgggattgtattctgtagggctctgaagatagcacttggggattgaggagtctggtctgggaagtgaaccttgtatgtagctctggatctagggttctaaacatcctgctttagaactacagccttgtaagtgatttttgaaacaactcattcataggcagagaactgtctatccttcaagcctgagagaaaatgaataatttacctctccattttgatcacctgccactgtagcattggtccttccaggcctgcgtgtgccctgggagggtgaaacaaagctttgccagaggtgcctccactgtaaagcaaacccacagatagtaactgttgaaaccagcacatccctgtgcagtgaaaagggcattccgtcggcagtcaccaccttgggcctggtcagggtttcagtgaaatccctttccttatgttctgctggcattgaacataagggaagggatttcactgaaatgttgaatgttcaaatccaagcagcttcaaggaatccccccagctcccttgctgtcaggacaggaggtggatctctgggacctcttgaaactgcttggaattggaacattcattgcttttctctagacccagaactaaggcagctttgctcaatgccttgctcagccatttcgccaagtgaggttttatgcaatgttactcgtcactactctgaatcccagtttcagattgcaggacaaacagacgcctttttaatcattgatgccccttcctaagggcccaatcagaaagtctgactgggccctagcaaatcattccttgccaaatgtacatgaatgccagttctaggaagaatgaaatagtaaaaatttgtagaaatcaacatgtcatgtggaattagcttagcacattccagtggctctaggggtccttgtcccccactctcgccttataataaatatagaaagaacattgtccattcaaccctaagacttggattctggctgtgccatgacacctggtagctgaatgtctttgagctcatctttcctcacgtagatgatgagtgaggtgcaatggtgaaggccctctgtggctttgtgatttgtttacttgattatttattgattccattcatgttgcagatgtctgtcgagtatctgctgtgcccaggcaccgtgctaggcactgggggcacacagagtgagtaaggcacgagggcaagttccatccatctctaagagccatgcagactgaggttggagctgcgtgcacagggttatctgcccccagctaccagagcccatttccaagatggtggaaaccacttagtggagtctacactgcagtgagacagatttgctctcagccattgtcacactattaattagcttccactgtgttaagtgccataagcctttgttccagaggaatccaagtgggagaaaaagagcagagtggctggaaggttaggtggtaaggaggcacagaggagggagagggggctggggccagggagctgctgtcatgggcaatgggaagctagcaggggtggggccgtggtcagtttcttggtgggagcaggagctccagctttcctgtggctcagctgaaggttgggtacgaacgggacatagggctgaacagttcacattgttaaaaataaataagttcctcgtttataattctgattaacacagaacatttataaaatacagcctctggaaaagtgacacaaaatgcattacaatatgtcattctcaatcttttaataatgaaaaatgtgagacgcccaagatcaaaggaggcacatgttcagggaactgtttcatctcagagcttgatggggacaggatgatggactgggttttaaaaatggactacctggtcagtttcatgtcttttgacctacctcggtatgggctgttttcctcatgtttataatctagtttaggagctttttcccatcctggctcgttggctggtttgaagcctcactttattcttcagaagggccttggtctgtccaccaccagatgtctcatgtgttatctgacacataccagcttcgtggatatcaaagggggaggattacagggccattgagatcaaaacagagcaaatttgatgatgaaccaggggaaacaggccaagatgtgtccctaatgggcttgttccatccgtttgagtaaattatgcatgggctggcttggagctgccagcagaagcaggtagatctgcctccacctgccaaacccagatccaaatatggaagaaaccacaaggcagccactgactgtggccacaaatgggcacatagtttaccttcactttttgaaaaccatattaaaattgagtcagcactccatagaactgcttgatgaccaccaggccttcctttataaagttctcatgaagaacattaacttttgggaaatgaagcacttatatgactatctagtagagtaggaactacgaacttcttatgttacaatgagagagccattcttatttttttgaaccaagattgagagttttgtcaggccaagaggcagcaggctaatttctcaacctttcaggtgctagaaacacattgtgtcatgaaaatttagttgccccaacgtggtgccctgttgatttttaagtcaagggcaacttcattcttttagtacactgttggaagaatcttgtcctggaggtgttaagattgccttcattaaacatagtcattcaggccgaatgcagtggctcacacctgtaatcccaacactttcggaggccgaggtgggtggatcacctgaggtcaggagttcgagaccagcctgaccaacatggcaaaaccccgtctctactaaaaatacaaaaattagctgggtacggtggtgggcgcctgtaattccagctgctggggaggctgaggtgggagaattgcttgaacccaggaggcagaggttgcagtgagctgagatcgtgccattgcactccagcctggccaatgagtgaaaccctatcgcaaaaaaaaaaaaaaaagaacatagtcattcatttcttcgttcactctcatttttttctaagtgtatacatacagtctttactctgtctatagtctctacacaaagtataagtatttcatttattagaagaaaacattaactgttttggggcccattataatgaatttttaaaacatcacaattttagaattatgattttaaaaaactttactaccaggtacagttttgagaaagctctgggacattgaatagctctgtggctcccaaagataagtcgtagacatcacaataacaagggattatagtatttgagaccttactcatgaattttaataaaaggctgtgtgactcaagcgatttcgtattctgggaaatgttcaaattctgtactacatgcctacattctgcagggttaggctgggaacatagacctttgctgagaatctgaagagaattgctaaggcaactgtgtcccatatcctcaggtataaatcttccctccctccctcccttccttccttccatttgctcatttattcacctacccattgattatcataattctatcaacttttagaatcttgagactttccccaggaaatagatgaggagggggaacccatataagtaaagttgatctcattgggcataattagctcaaatattatatactcttccctcaagaactgagaatgtagggctttatagattttaaaaaatctcatagtcttggcatttttttttctggcaatccaagtcagctggagaagctagggtcgggaaactagttttgcaaactggcagaagtagtggttctttactaagatggctcaattgagtctctctcataaactgttagattatgggcgtcagagctgtttccaaaaggaaacaaattggagtccctctcctcactctctttcgtatcatctaggtaaattgtttaaaattggtctgtgactctggcaggtgtcaaccgctccaagtgactgtaggtttggggttgccctaaagccaaatgcgtagatgatgaaagcattaagaacttctaaacatgagagcaacagctgacgccatctacacggggctgttgggttttttcctctggaaggaagtgacagttggatgcctggcactttcacatggcctattttccccatgggaagttttataaaaatatccattaaggctggtttgtatatgcaacagaagggcataatatgcccctcaaatgaatatcattatctccatccatgaactaaaagcgtttgagggatggcaatgctgtgcaaattccacaaagccacagcttttggcagagctcaactatgtggaaaccgatctcttctctctccccgtctcagtgtctcaaggaaaaacctcattaagcagacaccttaagaagtgtattatcttccctttaaacctccaaaagggagggaagaaaaggagggatgtgagagtgaagctgcctgtgtcatgtccagaagactatctggaagtcttttttacctttctttgctttcttaatcacctcgttgaggttataaagtcacgaaggagactagatttggtagttgttactttaaaacagcccaaaacatttataaaaacaggtttttggggggtaatgaaaaaaaatttaagtcagccacaccgtcacatgttcccttaaatagccacagtggggtcattggtaacatagacccataagcacatgctccatacagaatgggtcatgcagctttcaaagagcagcccttcctcaaggagctgtgttacgtgaatactcatcaaagaaattatccatgccgcttctttctaactcagtgaaaacttgatgaaatagataaaatccacaaagctgtttagcccttcattgaacagcctattttagctggtgcctattttcctgagattatgaaaaatccagttccctctttacaatagtcaccaaaaacctccatttccacaaagggagtaggattgcctctggtcagtaaatggcgattccacctctgggtaggcagaagaaaaggggaagcaataagtgggagggaagcacctataacaggaaaatgcaacttttctagaagtgtctaggagacttgtgttgagatctgactggccagagctatggcctgtggctaccgatagctgcaggagaatcggggaaatgtattttgttagctaaacatgtcatttcaacaaagctcagaaatctattcataaggggaaaaaaaatgaatggcttttggtcagaggcctagcagtgtctgctactggaagggaattcaggcccaggaagtgaaaaccgagtgattctatctaagaagtcaaagtgaacacagtgaatagtttgcatcccatacagatagctcactatcggcagtccacagaaagtgtacattgactgtatctggagggccaaaatttcagccaaacatcttgcctaattattctgtgcatgttttttaaggggaaataaatctgtcttgcagctaacaaaatagccttgagtcttagagtacattttatcatggagcatctgaaaataactcagctctgaagttccatgatgaagttgtcccctggcaatggggtaaaaataagtctttatccattcatcagcacaagtttagctaggctctttcaatgacttagttctagcttatgcatctgctcctaaaacaatattaactcctaatagtctccctaaagaggaactcaaagttctgtagagaagactctggttgactttgatgttcatcaagatgagaggctcttttttgttctcaagattctggattaaatgagctgtcccagtcaatgaaaacttggggcttcaggaacctaacagagccaacccaacagaaaggctaggtgtttgattttcattaaatggcatttacttgtcaacactgtaattcttggaattcaagtgtgtctttaaatatttccactagaagctaatcaaaatcatgattttatccattgaagcatttaaaaatgtgattatttcttctccaaggatctagaaaccctatttcctcgtattctttgtgtttaaaaacatactttgctttaagtttactattgtgaaacctgttataatcaattcaatcataccacccgttttgaccacttagtgttcagaggattatttgctccatttaggaattagaaatcttcatatcttcattagaaccagatttctttgcgaagtctgtggttcttgtagtgggagttaagaggaagcattaaaaatatctgcttcgttcatggagtagatgcacttttcaggacagatccctgttactgatctggtgttttctttgaaaatgtcacagaaacctccaagaatggcaagcaaaagtaagaaatagtacctcctctaggtgcatacgtcccaggtgtgatcagaaagagctcatttgaagcaatgtatttgcatatgtcaaaataatctgatcctctaatgcatttcctctgttaagccatagcaggattttgcagctaaattcagagagtcagcaagaagaaaagggtctttaaaaataagttgaggctggttgcagtggctcctacctctaatcccagcaatttgggcgtccacggcgggaggattgcttgaggccaggagttcaggatcagcccgggcaacatagtgaaactccatccatttaaaaacaacaacaacaaacagctagccatggcagtagctcttcaggaagctgaggcaggaggattgcttgagcccaggagttcaaggttatagagagttgtaatcgtaccactgcacttcagcctgggtgccagagagagaccttgtctgtcaaagaaaaataaaataggttgactaacagtcataataaccagcagccttcctgcagactcttcataaatactgagttgtttataattaattgtttgcaagcaatgaccttctctttctgtaacctgagaaatgagattaacaataacagaggaaagccaattacaaacagatacgtttaccatcaaaattttagcccaacagggcagatcagaagccccagatggctcacttcttttcatctgtgcttaagaatgcagtgaccatataacaaagaatttaaaaattaattgtaatgagagaattgacccatggtggttaccttttcttaggaccatggttttcattttaatgtggaaaactgacatcccctggaaaagtagatattagagtaacacttgttgggtaattaactcaataaacaagggaactgacttgtattagtccattttcacgctgctgataaagacatacccaagactgggaagaaaagtaggtctaatggactcacagttccatgtggctggggaggcctcacaatcatggcggaaggtgaaaggcacttcttaacacggtggtggcacgagagatgagaaagaatcaaaagtggaaaccccttataaaaccatcagatcttgtgagacttactactacaagaacagtacgggggaaccgcccccatgattcaatcatctaccaccaggtccctcccacgacatgtgggaattatgggagtacaattcaagatgagatttgggtggggacacagagccaaaccatatcatgactcttcccaggaaaccgttgatttgtgagttgaatataggctctgctgcttatttagttttttctcccatttcctgtaggacagacattaggacagtttttcttctctatcttccactggtcatttctttggtaaaagaagttgaattgctccttctttgtaccagaatgcctgtgttatcacttgtagcaatagaaattcacaaatgtaatcagatgaaaggtctagaattttcctcagtggataacaatgtaagtatcacttgattattccatccttaattactgacctcagccagatttttttttgcctgaacttgatgtaggcttttaaagagacaggtacacatcagcgggcaatagatttgtttagagaccttggaagcctgatttgcaaagtaacttcatgtaatggtgtgtcacccacgaaggaatgggtggaaagctgcagcttgggttaaatgtcaccattgtcattatcttcagcaaacatgtattgagctcccaggagatatgcaacgtggtctctgatctccaagagtgtgccgtgccttgggagggaatgcaggattcattcgtttgacagatgttcacaaagaacctgcttgatgcagtggccctcttttgggtgctggaagctcaaccatgagcaaggcagatcaggtccctgctacgtgtagaatttacattttaaagaaaaagttgaatttaaacaaaaatggaataagaaagataaagctaaataagaaataagataacagaacaaaagctctggagggcccctttaaccgagagagtcaaggaaaacctggaggagtaggaggcaggcacagttgagttgagccctgaatgacaagtgaggcatcctcctgaagagctggggtgcctggctccaggctgatggacagcaagtgcaaaggccctgaggcaaggaaatgtttaaaacctatgctgagaagaggtgaagagaggggagagagggactttcctgaccagggcagggagtagggggctgtacccaaagacactgaggaaaacttgtagggtgtcatcaagttgacagagagtcctgtggtgggaaaagagactgaacaattacattgggtcaaatggtagccggactaagtaggcactggggagtgactagaggtttttgagcaaaggagtgatgcatgccagtcagtgaatcctgaagagttaatctgactggggtagagtgtggcatggggaaggaagccaccgagaggctagatatggggctgtaaggcctggcttagtctggtaaagtggggttagcatgaaagggccagttcaagagacattgccagccacatggacagtttcatcttggccagttatctccagactctgaaactctctctcagtctgtttctactattgtagtactttggggaaggagtagggagaaaaagatcatagacttgaacaaatcaggtgccactgggcagagggttctaaatttgcactctccaacacagtagccactagtcacctgtggtgatttaaatttaaatgaattatttggccaggcgtggtggctcacacttgtaatcccagcactttgggaggccaaggtgggtggatcacttgaggtcaagagtttgagaccagcgtggccaacgtggtgaaaccccctctctactaaaaatacaaaaaattagccaggtgtggtggcaggtgcctgtaatcccagctactctggagactgagggaggagaatctcttgaacccaggaggcggaggttgcagtgagccaagattgtgcctaggtgacagagtgagactccatctcaaataaataaataaataaataaataaataaataaataaaaagaattatttgcaaataattgcatcattagaaaaaaattataaatgaattaaaagaaatttaaagaattcattaggagtcaccacatttcaaaggctcagtagtcatagaaagctaatggttactatattgaagagtgtggataaaatacttccctcattgcagaagattctgttggacagcattgggctggatcacgaattttctgatgaacaaacccttcatctttctatagatcacaagaaagtctcccatggtgttttatatcacgaactactttgctgtggaaacttctgtttgtacagaacgtttcctcttacggataccaattaagttctttatgatattacattggtttggctgtcaaatgttgtgtgcttaacaaagaatgatagaaaaatcactttccagaacagaatgtttgaattgcatgtagcatagaaactgagtaaaaatttcagcctgatttaacatctttggagtagacttcttaaaggagagggatatgaacactgtaaaacacaaattcatcagaagtgcaatgacaacagggttcctctctactctgctggtgacaaactttaaaactctattgacttgtatctcttgatgtcattctattcccctctagtggaattaaaaggtatctgtctttctactccagcttggacacattcgcagtagtaggaatagaaatctagagataatgaagatagaagatagcattatcacttattttcatatcatgataggctgctgctttacattttaccctttttcctgtcctcaggggaaaatagccttctgttctctgtctatttgagctacttggagaaaaaaagtttaggtatctatcctatgtatcactatttatcctcataccagaagaagccttattgcccaatatgttactaggatgtgccattggttcagcgtctagcacagggtcaggcccgttaattgagttagaggcatgggttgaggtcccgattttaccacttaactatccatggcttcaaattcaatcatttactttcctgaacctccgtctcttcatctttaaactggagactctcctttgactctccatggtcgtatcacaagataaaaggaaataatgaaacctcattgaaagttaaggtggactctgcacatttatgtggcctcattccccaccaccaccactctgcccccagcagcatccttttaggaaagatggataaacaggtaaactagaaatatgtttccgaactctctgcgtacaggtgaagcatggtggggctggggctacctttaagttggttgcaagagcccaaaggctaccatttggtttggttatatttccttttttcttttgtcttcctctttttcttttcttttttttttttgagacagagtctcactctgtcatccagcagtggcatgatcttggctaactggaacctctgcctcccaggctcaagcaatcttcccacctcagcctcccaagtagctgggaccataggtgcacaccaccatgcccagctagtttttgtatttttttttttttttttgagacagagtctcactctgccacccaggctggagtgtagtggcgcagtcttgactcactgcaacctccgcctcctgggttcatgccattctcctgcctcagcctcccgagtagctgggactacaggcacccaccaccaagcccggctaatttttttttttttttgtatttttagtggagacggggtttcaccatgttagccaggctggtctcgatctgctgacctcgtgatccgcctgccttggcctcccaaagtgctgggattacaggcgtgagccatcacgcccagcctagtttttgtatttttggtagagacagggtttttgccatgttggccaggctggtctcaaactcctggattcaagtaatccacctgtctgggcctcccaaaattctgggattacaggcatgagccatcgcgccctgccattttttcttttaaatgttgagttattctaagtttaaagtggctaataggagaaacaataatttggaacattagcagttacagtatttctctagtctcaaaaagagcattctcactagaagtatccacagaaatgcacttaaatgccacatccctccctctcccctttattccagccaccatgtcataacctccctctgcagagcagagaattaagctctaaagactagacatttgttgtggcaaacagtgctgaatttctgcctttattttaacacaactgtctgctacatgtagaaatattagcatatttgcagagatattttcattaggtatttgttttgctttaaaaaacaacccagaaaggtgaatttcaaatgtgcacagtaggtttctgccatcctaaaggcaaacttcaaaattttttaacagctaagcaaaccatgccagtgggttaagatgtaggattggaagtctctgatgctgtcctggggcgtgggggttggggggaatgtatcaatgagtactattttggtcattattcttcaggttgagttctgggaggcattgcttaggacacatttaacgccacaagggaaagtgcattagtgttgccttctgttgtttaaagaaaaggagggagagagggaggaaggaatacatgcatatgatacttttgcatgctctgtgaccaccagcacacaaacaaatgcagagatgctgagaagtgcaaagtgagacgtggaagggcaggtgctaacagacaatgcagctatacttgtgatggtgcttttcacgagtgaagaccaaggtgtaagtgtcttttacccagtcacagctataaaaccgaatccagtggatcaactaaaactaagtgccaaagaggccaatagcagtctagaactacgtgtgagtgtgtgagtgtttcttctggcaggttctcctgttttacggcttcctaccagccatccttaactaacgcatggttggaaattcagtatccccccccaaaaaattgaaccttcatagtttcccaattcctggttttagaaaaggaatgaaggggtatcaattagagatcaagtgcatctttgaggagagaatggcttgctacaatcgaagagaagaaaacctcagctatcaatttgtggaggctttgagcagtcactgagcagatggggttgatgggggtacctaactcatgcacggccaaatgcccaagcctaacaaaaacggagaaaaaccaaggattaacatatcactttttagctaagatgtaaaactggttactggcaagcttattccagcaggctcagcaagcgtccagcacaaccacaagcagcttgatcaaaaacagacctctgcctctcggtggatagcttttgcttttaatattttatgttcacctctttggctcaagatttccacttctggcttttatccttgggaactgataagacacttgcacagtgtgtgcttatagatgctcatggtagtgttattcataacagtgaaaaacaaaatcacctgaatgtttaggaattgggggttgattaaatccatcatagtgtgaatgtatgatgaaatatcatacagtaagatgtgacactgatttatatttaatgacatggaaaaatgtttaacataaactgttagattttttaaaaagctacctatcagcctctctctctttttttctctctcatctttcttgaatgaaatccaccaaaatgttaatgtgtatatacttctttctacttaactaccttttctaattttttacagcaagtatggttttacctacttaaaagaacacgtgacctaaacaatagaaaattagtaacaaattactagaatactattttaccataaactgcacatttcgatttttaaagtgaggttataaccaaaaagatcactgaacatcaataaataaaattggctgggcgctgtggctcacacctctaatcccagcacttggggaggccgacgtgggcggatcaccttaggtcaggagttcgagaccagcctgaccacatggagaaaccccgtctctactaaaaatacaaaaaaattagccaggcatgttggcgcatgcctgtaatcccagctactcgggaggctgaggcaggagaatcacttaaacctgggaggcagaggttgcagtgagccaagattgtgccattgcactccagcctgggcaacaagagtgaaactccgtctcaaaaacaaaaaaagaaaataaaatttatcttaacgtgggtaagaggggttgctgcttgggaaatatctactggaagtaatgaggagtcagggtgaagttcggaggtacctaaagagacagtcctgccgatttggacttggcagtcgagaaaaagacatggttacaccttctgcctcctctgtgtgtttaatagatgaacaaataccagctgctggggaatcttatgacattatagtgaggcataaaaatcagccctcttgcaaataatgttatactatttgaacttcatgacaaaaatgagtgcagaatcccagtcatgttagctccctactaccaaagagtggacttcaaaatttgacccacatcatcacagaatagcagacagggtacctcacacaatgacctgatcctgtttttactaaattaaaatgatgggatcttgcagactctgaataaatgtgtttttgtttatctctgatttgttctcagtcgtacagacttggccatgaattcttataggagacttaccactttgtacagggctggcagaggtttgcataatttagatgcttcttgtattcctattttacgttcctttccaactatggtattggaactaaccaagtctgtaattagcataaacattatttggtgctaaaaaaatggtatcacattttaatagaggatagatcagtggttgtcaggagttaggggaggggagggcatgactataaagagggtggcatgggggagcttctttgtggagattgggaagttccgtatcatgaatatgaatgtgataaaatttcacggaactacacacacataccctcctatacaataagcacatgtgaaatccttatacagtctgttcatagcattgggccagtgtccatttctgggttttgatcatgtgctatggttatgtataatgctgttatttgagtaagctggtgaaaggtccatgggaactctctgtgctatttttacagcttgtgagtctaaaattatttcaaaataaatgttttaaataacatttttttaaaacgtgagctattcctcaaaagattactattctcagagttaccataaagctagttaaagtagtcagtacccccaattgaatgggcaaagaaatacaatatttgaatgactttttccttagaggaatcagtatgacaataggaaaaagaaaaataatgatttatccttgaaacaaaaactggaacaaaaacatgatttaagtatatgtgtaagtatgtacttaaatactaagtagataggctagagaaagacatacaggaatatctgtggaatattgtattattgccccccactaattgttcccttacctctctgatgatcataggtcctacccattgctatgtgacttgtagcccctccctggatgcagagcatccccaacctagggtcagtcttggccaaagggagtgaagtttagctgcttcaagaagcattgacagactgtcgttcagtttcacctcttgcttttcctttcctctgccatgagaatggcatgtcccaaatagcagctgttccttcatctctaggtcctggaataagtagacaggtgctccttctctgaagctcctgatatataacatgagtgagaaataaacctaggccaatgagattttgaggttgtttggtactgctttgttgctgagctaaaattacatctacaaggtggacggtttcattgggcatcaccaacttgaaactactttcagttgaactcaaacctacaagctttcaaagtttgaagtcctaacccatcctgtggctctttaccaaataatataaaatggcagtagatactaagctttctgagggccattgtagattgtgttattatttaaaatatttgctgtccccttctggggaggttattacacccggccctgttgacttccagattggccatgtgccttgctttggccagtgacatgcaaacagaaatgatgacaccatttccaagcaggagatatatgagccgttgagtactctgccatttctttttttcctctgctgtgagattgcatatgtcctagatagtgactgctaaagtccctaagtgaaaagtgagataaatttttgttgtggaaagccactgaaagttagaagtgatttgttagcagtataatctagtctcttcattccaagttagataggacctgagcctcacctggagtcttcacatggtgggcacaccacctggcacatagtaggtgtacggtaaataattttttttaggcaaaatgaagaaattgataggtacctaggaaataaccttatttataaatgagttatgtttagggtttgtgatttgaatacttacacattttaaacatcttatttttattactgttactttagagacagggtctcactatgttgcccaggctgaagtgcagtggctattcacaggcatgatcatggcgcattacagcctcgaacacctgggcttaagcaatcctcctgcctcagcctcccaaatagctgggaccacaagcatgcgccactgcacctagcttatctttttttaatatcagaattccatattaaaccatcagaggtttttgaaatttaaaagttgtgcagggtgactataatcaataataactacacattttaaaataacttaaggagcataattggattgtaactcaatggataaatgtctgaggggatggatactccattctccatgatgtgcttatttcacattgcatgcctgtatcaaaacatgacatgtaccccgtaaatatatacacctatgtactcacaaaagttaaaaataaatttgtttaaagttgattgatgatggagcaaaaactggacataaaacaatgtcttgagatgttaatgaataagatatattatgaaataggaagatggtcttaataatagcttttcattaagagttgtattggtggcttgtggtgttaaatatcttcatagtgccttcatatagacaccttcttctgcagattggtagagaaactgccaacaaagcccctgtgtagtgagatgaggtggttgcgccccagttcctccagcatgctaggcttttcccccaatggtgtctcatgaagcagccggaatatagccagtgtattcagctggacttcgtggtaatttgggttacatagataatgtatggatttattttttaacttaaatcttttcagataatgttaaaagtctcattttactttcatgtctgaacctaatctgtccccacactttcccagagtcatttacttatttatcaatctagaaaaaaactgtcttactgttcagaggagggggctttttgttttttgtttgtttgttttttgttttttgagacggggtcttgctctgttacccaggctggagtgcagtggcatggtcagggcttactgcaaacttgacctcctgggctcaagcagtcctcccacctcagcctcctgagtagctgggactaaaggcataggccaccacccccagctaattttttttttttaagtagagatgaggtctcgttatgttgccccagctagtcttgaactcctgagctcaaacgatcctcccaaagtgcttgtttctgttttttacataaaagtcattatattttatgtcttgtgttgtggcttgctgttttcattagacaatatatcttagagatctgtccatgattttacagaaagatctagctcatttgatttaactgccatggagtattccatagtataaatatattacagtttatttagccattgccttgctgatacagatctatctagaatttttaaaataatttattgcttcccattgaatgattacagcatcttgcatagctgggcaaaggactcataagaaacctactagcaaaacctggtttgacaggttcatccaactgtatagatgagtgttattcaccagaataaactgaagtgttacattgcagatcagaaattaatgagcatcaccaaaaacggaatttctttcgttctttcttagaaaaggaaacatccaacaagatcagtatggtcagaggccaagtgcgatcctaagcccaaatggagagtgggccaggcagacccagccgcctgagaaggggcatggcagctttactgagtacatgatacacaatgtaataattacagtggtccccaagttacatgcaaccaccctgatcatatgacttggttttggtaatcctctcatgttaaccaaaaaaattttaaataggtctttttttatatcatagggttaaaaaaaaaactgcttcctacttccctaaatttcttaagaaatttaagatcgcagtaatgttgctagatttgcccttgaagcagtgttttgggtgtttctcatatagtcagcatgtgggtgacatttagacccaagcttggcttacaagcatgattcatgagaacacatcagatggtgacagcagagaatttcccttggtacttagaggggagcagcttcaaggaggcatactgctctgactgctggaggaagttgcaccgcagagcttctgttggttaaaaacagtcttttccagaaaccctgaacccccagccctcaatgacagatagtttggtccttcaagagaaacctatggggcattttggaggcattcaaatatgggtggaaaattcaagccaggatgacctctaaccaaaaccctgccattattttactcattgcattaaaagcacatgtgcagtgatgtcagttcaaatatgaacatccccatcaaaaaacatcattggttgcctgcctcctggtgtgaagggagcgttaactcctctagagatttcacactgcacatagctagattagtctccagcctcaactactgcctttgcagacttacctagaatatgacttccaggtggctgtagacacaagaatgcatctaggaaatgtgatgcccggtcagcatccgaattctgcacagtgtagatccatgtgtttattttaacatattgcaaatgatagcggtaatgatgatggtgataaagagaaactttggaaaatcttggtagaaatgttgagaaatgtttccaaggaagactaattaagttgctacattataaaactaagaaatgagaaacaggccagcggatgctttcaatagaatttgaatttttcacttgtcatttttttcctaagaggtttagatttagatttgtaggttagactttattcatgcctatgaaaagtgattagctcaaagccttcatttttttctcccaaccacatatatgacagaagtgtctgagctgtatttttccctctttcgttataatataatgtcaggcttgtgacatatgacagcaggtttcacactccacttaatgacaggctgccagttcctggagaactaaaaaggaagactaatatgtatttgactaaaaaggaaaatgttattaacttggtaatagtgaagacttggtgtgcaccagatatttctttgtggccctaagtctagccagacttgctgtaacttatctgtgggatgactttatctacagccctttggtgcacagtgataaaagtgtgctttgttaaggatttagtagttgctttcatacacatttaatgaaggtctaccatgtaggagataaaatgatttcagaggatacaaagacagacttctgcattcaggtagttttgcagttcaagaggaacctattaatgtcactttcctctttttaccttggtttccaggaagctcagagataaagttaatacttaatcctcagttcggcagcatcctttaggacctctctttcctccctgttagactgtcatgtcagtcctctgtgtgtgggaggtgagagataaatgatgaaaaattaaaggggaggtagacagaatcataattatcataagtggcagaatatgttaagtggcatgcaaaagacagaaataaaatgctctggaaggtcagatgaaggagagaaattgtaactggtattgacatctggagagacttcctggaggaggaaggagactttgataatgacttttcaggtgtttcagcaggtggagtcctggcaggtggaggcagcagccgaaatgaagacacagatgagagacaccaaggtgcctgccatctgggactcaccgaagagaaagatcagatgtccaggtttatagatgtaggaaaggatcctgaggctgctctgatcatttccatgatgaatttgatgaatttgatgaatttggtagctatcaggagacctactcttgggccagtgggggcagcttgtgccctggtattgtggtgttcaccttatctgtccatccaggtcacaggcatcacctggaagccgcaagccttacccacctttcaatccctcatggcccaggctggcgccacattttgcctgagctctcattctgcctgtgccttgagatgattttgttttgaaaaacgggtcagaaaggtttggaaacagcagtgtgtttcctttacttagagaaaagcgtcctaattctgcttttcagataaatctttagactcatcctcccacgactccttaacatgagatcagcgggttatatatttaatgaagaagtaaaagatgttcctttggtgctgttctacttgagttaatgtatttcaccagccaatactactgtattccctattcagtaaacagtatatttaatacatatgtagtacagtaaatgctcttgcattggaattatgcatgtaaaatctgatgaaaccctaaactctgtagtttagttaatggtattgtagcattgtcctgggtctgcaaatgtgccgtggttatgtaagatgttatcactggggaagctggatgaagggtatgaaggaacagtctgtactatttttgcaaattcttgtgagtcttaaattatttcaaattaaatagctttaaaaaaaaaagaattaaagagatgatctagtccggttgttttcaactttaattttagcagtggtctccctcttctgccttctcctgcctccatcctcagcatccttaggcaccacctgacgttttaaaaatgctgatcccacccaatacatttaggctccagatgaggaaatcagggcccacagaagtaaaatgcatcactatttagaggctattgatagaaacacagtgagcctggggagtttttaggacgagttgctctctgcagatcttcatgactcacagctctgtcgctaacactgtggtttcttttgtcagactaggtgagattaattagactggaaaagagtttccatgctcctgcatcccattgctgcagtgcaagaaatggcatcatccatataattgagacagtgcaagaggtggtttgggttagcagacagtttaacaaaacaccactcagggcatttgccaagaggactggcttgaaagtccaggcatggggtgcagaagtcgggaatgcgggacctaggaggaagtcccttgacttctgccagcttggccttcactctgaccacctatgaagcctgagggtgattagcccagaggatagggagtcctgtttcctccccatccaggcccaagtcactaaagtattttggggaaaccctgggcaccttgaagtttgctcctaaggataatgtaataataattgcttatatttgtctaaggattttcaggttgcaaagtctttctcttatattccctaagctgggtgtcaccccttgcccatgacacgggcagattggttttatttctgctttataaataaatgacgtgacttttccaaggtaagagcttgtgccgggactggggtcagaacacaggtctccacagtcctgctaagtgctcttctcataggagactctcttgttctaaacaaagatcctggttattgtgaagcacctgtgcacaattgctgatcaacaaacagctggtgctattattattactgtcgttgtaattcataggcaggatctttggccacatgtaattttggggtgtgacaactccaagacttgctggttctccagacttaggcaggaggtggaagcgatggtttcctctcttcctacacctccaaacggtgagaacctgaaggtgccatatggctgttgcgtgagtaagccttaggttttcctgaaaagtgagttgcctgtgtgccacatcaatggagatctatgtgacaaccaactggtatgacaaccaccctggggctgcctggcatgcacatactcctgagggctccgtgcgagctgccattctttattaatttagtgccatttgttgatgcctcgtttctgcagggaaaactggttccttcatttcccctggcatattctgcgccctccgcactgtaggacgcaacctttcctgtcaacacaggtatttttaattggtgctggcaccaacctactccctgaacattcttcctgatgtcctgggatcctggcaaaagtggtgggcttccctaatggtggaagtctaaggccatacttcagaccgtggacccaactactgctttctagaagaaataacctgtcaaggaagatgttgatgtctcacaccctgagagaaacatttaggaggtaaaccactgacctgcctcgaggatatcattaatcatctacacatagaggtgctaggtactcacctcgcaccagtgacacacttactaaatatttgttgaatgacctcctagagcagtggttttccagtctttagtgtgtccgccaacacaaggatcactggcaggatctgctcaaacacagactgtgaggccccacccccagagtttctgactcggttggtctgggaaaggactaagtactatgcctttctaacaagttccaagtgatgtgatgctgtgcgggaaccatgctctgaaaacccttgtcctaaagcagggcttggcaaacttttcctaaaaggacccaaatagtaaatattttagattttgtggcccacacagtctctgtcataattactcaactctgccattatagccaaagaaaatatgtaaataaaggagcatgtctgttttccaataaaattttatttacaaaaataggtggtggacttgtttctaaaatatatatatatatatgtgtgtgtgtgtgtgtgtatatatatatatatatgttgcaaatataaaaatgcgttgtaaatatattgagagccagatcctcattctgggtagatctccaaaagctcttgtgatgggaatccaacgttggtcacatcgtaggtctgtgctctctgaagcagcacaaatacaaaacttggagtgaaacagagatgagcgttgttcctgtgcaaggatcacgtgcaaatatgtgaactgtttcatataaaaaaaaatctgaggtctgatgttcatcaaccatgtgatttggggaaggtcattaacatctctgtaaaacgaggataattaggcagtaaaaactaggggaaaatgctcatttttataagttctgggtggtgcagacacgaggggtttactattctttatacttctctgtatgattgaactatttcagaattctcaaatctgtgtctttaaaaagtagtcataggccaaatgctttgggaggccaaggcaggtggatcacgaggtcaggagatcaagaccatcctggctaacaaagtgaaaccccgtctccactaaaaataccaaaaattagccaggcgtggtagtgggtgcctgtagtcccagctactcggggggctgaggcaggagaatggcatgaacctgggaggcagagcttgcagtgagcagagatcgtgccactgcactctagcctgggcaacagagcaagactgtctaaaaaaaaaaaagtcataacaagcctttggcatatatgtggcttagggtttaggttccatagtcaaccaaaagatgaattatcttacagtcagaatcacctttggaattccccgaaatcaccagcaccaaggccctcagaaagtcagcagccaagaatattctgctttatgtcactttgcattggagaaaccctgagagaaaggttaattcaagcttattatgtctacagtagatctctggatctcctgcccttccccaaaccctgatcttctaaagtcttgcttaattcagtggatggccactctgcctttgcagctgctcaggccacaaggagtgattcaagaggaagaacttaataggaatgagtcctgataggtacatgttgaatatgaaattgttttatagttccaatagaacagtagagtctatggccataccaccctgaacatgcctgatggaaagctaagcagggtcgggtccggttagtacttggatgggagacaaatagatcatctaagtagaagctcagagctctactattatttatttatttattttttgagatggaggctcgctctgtcgcccaggctggcgtgcagtggcataatctcagctcactgcaacctccacctcctggactcaagcgattctcctgcctcagcctctcaagtagctgggattacaggcacacgccaccatgcctgggtaatttttgtatttttaatagagacagggtatcaccatgttggccaggctggtctcaaactcctgatctcaggtgatctgactgcctcagcctcccaaagtgctgagattacaggtgtgtgccactgtgcctggcctacctttatatattaataaacagaggaggctgggcgcggtggcgcatgcctgtaatcccagcactttgggaggccgaagcaagtagatcacctgatgtcaggagtttgagaccagcctgaataacatggtgaaaccccatctctactaaaaattaaaaaaaattaggtgtggtggcaggcacttgtaatcccagctacttgggaggctgagacaggagaatcgcttgaacctgggaggcagaggttgcagtgagccgagctcgtgccactgcactccagcttgggtgacagagtgagactctgtctcaaaaaataataataataaaattgaataaataaataagcagaggccccagaagcagaggcgcttatctgcactacctgcgtggtacctacctaccctgtgatacggcactcttctaagcattttacaaagactgactcgttttgtccttatttatagtaaccacagaagacagatgctgttaatttcccagcttatagatgaggcagaaaggataagtaattcgtccaaggccatgcctctgggtagtagcagagctggaacctgaacccaggcagtgactccagaatctacgctctttaaccacgatggtcttctgtatatcatttttcttccctatccataatctgtgagttgagggacaaaagcttaaaaatctaaagaaaaaagatgtctggttgcacctttggtgctctatgtggtatgctagagaaggtaatgaaattgcagtgggctatggggaggcgtaatttcagtgcctttacgattttcatctgaccatgctgagtttccctataaaaagcataaaatactttggagatggtgcagaagcaggaaaatgtacctgtcagtttggatgtagatctggtttcgcagtgtattgtatttctggatactctgtccaagaggagatctcctgaatgatccatttagggttgttccgttcacttcacaaacacaccgattttgtgtctactcgtgccccagcctgcgctaggcagtggggagacagagaagccaagttgtttaaaacactgtgcttgtccccaagggctttggtgaccatagctccagaagtaatagctttggtggaaaccgtggtatgtgcaaatttcaccccataaatagaggaaacataggtattcattatattaaaacatgatgcgggccaggtgtggtggttcacgcctgtaatcccagcactttgggaggccaaggctggtgcatcacctgaggtcaggagttcgagaccagcctggccaacatggtgaaaccccatctctactaaaaatacaaaaatacccacatcgtggtggatgcctgtaatcccagttactcaggaggctgaggcaggacaatcgtttgaacccaggaggcggaggttgcagtgagctgagatcgcgccactgcactccagcctgggcgacgagcaagactctgtctcaaaaaacaacagtaaatatctaaaatatttagtggcgaagtcaccaccacccattgtgtgactccagagaatgatgcacagtctggtgttatcgaaccttgacttggggctggggagtggtggggcctgagcttggcttaatctaaaaacgtggtcctttcatgactaaaatgagcattgtgcttcttctcctcccaggaccccaggagcaagcacaagttcaaaatccacacttacggaagccccaccttctgcgatcactgtgggtcactgctctatggacttatccatcaagggatgaaatgtgacagtaagtaagttttcttttccagttcatagcgaggctctgtagctcatgctcagggtttgctgagcaaggaaggctcagtaacttttcaacaccaactcttcagtagagggaattagttcagatatctaccagactgacaaagtgtagattcttccactgtcaaagttccaggttattgaactacttgattgcctcattatgaacccccaaaaagcactcgatttataaatgaggttggtgggtgctgtcactttttttttttttttagtggcagaagtcttcaatcactgtaaaatatagcctagtcaaaccccaaagaagacttccaccgccaggtccacatttggttatagcttcaaaataagccaagaaaccctactcattatcttcctgtgtctctaattagtgggtggactgtggaaaaatccagtaggctcttcttaaaactgaaaccaaaatgaacataaaaaccagaatagcatcttattgaagttcactgacccagcatgtttatggacggatcaaatgtgtattagcctggctcaaaacgctgaggaccactgacaagcaagacaccagcccttttctgttattttttgttacgtgtgtatctccatcaactaccaggaggaaagaaaagcaactatgaagactctttgctttgatcattttttttttttggagacggagtctcactctgtcacccaggctagagtgcagtggcgcgatgtcggctcactgcaagctccacctcccgagttcacaccattctcttgcctcagcctcccgagtagctgggactacaggcccccaccaccacacccagctaattttttgtatttttagtagagatggggtttcactgtgttagccaggatagtctcgatctcctgacctcgtgatccgcccgcctcggcctcccaaaatgctgggattataggggtgagtcaccgcgcccaacctgctttgatcgttcttaaagtatgagattcctcaggctatgtttgtttaaatacaagctgatacctttaggacatgaaaagttaattgccgagcctgtttttctaatagatcgggaaccactgtggaaatatcagcctattgccatttgctaatgactattttcatttgctatgatggccagaagctgatatttgtatcttacatggagcaaactgtagaaaaagaaacataaacgagcatcatagagtagatggagtttctcaggacacagggattcttcaccttacagagttgtacggcatcacaaccaaatgcaatgtttgtttacttcaagaaacgctgggatttccaccatttaatcccagcactttgggaggccgaggcgggaggatcacctgaggttaggagttcaagaccagcctgaccaacatagcgaaaccccgtctctactaaaaatgcaaaattagtctggtggtggtggtctcctgtaatcccagctactcaggaggctgaggcaggagaattgcttgaacccaggaggcggcggttgctgtgagccaagattgtgccattgcactccagcctgggcaaacaagagtgaaactcggtctcaaaaaactagaaaaataaaaaaaagaaaccctaggattccaaagacatggttttcaggggttctgcaagggcttacaacttaagtgcatatgtaaatatattttaactactttaaaactgggaacaaaataaatatttgaatgtgttacatactcaaccttcactccttgggcagaacttgcaatcaggtttctcctacagcatcctcttcactgaagagtcagctgggatggggaagcatgccgttagacacggttcctgtttgtactcagttttctgcatgaatgaggatttttggatgctgtactactttaacataatgcaaaaataaatgagatgtggaggctggtctgagacatcaactggtttcaaagttgtgtttgtatcagagggctttattggtgatccttgaatgtctttataataaataagtggtataaatttgtgtttgttagctgagtttatgctaataaaataacactcatatggtttacatcattagattctgctttagactttgtttgcaaaatggtttccttactaaaaatttttgaaaaccgctgacctggaccaatgcttttttgtttggttttgttttaaactctttttcttgggaatcataaggcttctgtggctgccgcctgtgctcctttctggagacaggaggagagcaagccgatgagcaccaggactgcaacccctactgaccttaacttctgcagagaagaagcctcttcctgtgcccttccacctggtgcaattgcaatcctagatagagttccacttgggatggggcaggacgtcagggggcagttagcaacaacaacttgagtgggccaacctctcactttgtagagttggaaatgaaattagagcaaatcagcttcccaagatatacagcagagactgcaacacggcccagtgcactttcacctcccgtcccctccccgttgcctctgtgctttccagaggctctggcatttactgccttcacattgcaaattttgcccggacacttaaagacatgatgtggttaacacaagcaatatacataacacagcttttcaagagcctttatattggctaaattcgaggtgtagaattttgaacagttagccttggaaatagaagcctaatagcatccacatttgtgaattagctaattgttctttcctcagtatgtccatcattctgctgtcagtgtttaatcggagcagtatacattattcatgatgctttttccaatttactttgtcatgttaaaattaaacactcaaaatgaaacggaaaggaagactccaccttgatgattacagaataaccttattagcatcctggcaaggatttgcaaggattccagtggccttccctccttctggaagcctaaaggtacaagggtgatcgagctggaacacccacacacagtcttctgtttgtttccggcacacaggattcttttcagggtttctttggttcattgcaataatactgatctttttttatcctccccctgtctcacccacataatgtcagctgtaaggaatggctgatcatgctaggcgggtatttgttttacttggaatggtatttaaatatttgaagataggtttaaaatatcaaatacaggttctttggggagaaaaacacaggcaatgtacttaaaccttgttgaaaatacaaggttagctgaggaaaggaaaatttaatgaattttctatactcaatccacagattttcactctttctcagtggtaagcccagaatgacataaagaattcattagcaaaaagtcttatgttcaagctgggtgcagtggttcacatccatagtcccagtactttaggaggcctaggtgggaggaccacttgagcccaggagttcaaggctgcagtgagctaggattatgccactgcactctagcctgagagacaaaaggagaccctgtctgaagaaaaaaaaaaaaatcctctgtttaacattttcatattattttgcctctgtgtacataaaatatgaattaggctgagctttgtacatatttacctgtgtgaattttgtatactgttaaatacttgaaacaatcacagaagcccaagctgggatattttgcttcagtgaagactgagcaaatatggtatgagtattttaaggatattgtcactcacatgaagcctgtgctgtacaggacatctgctaacagttctttatgtcaccaaaaacattatagcaaagtatcgagttgggggtaactcattttcacttgtgctcatgcaccaaaacactgaggagcggtggttggagtccatatgcccagctcaccctctcctttcttgattcacagcctgcgatatgaacgttcacaagcaatgcgtcatcaatgtccccagcctctgcggaatggatcacactgagaagagggggcggatttacctaaaggctgaggttgctgatgaaaagctccatgtcacaggtaaggcttgctcatcccggagcagcatcgtgggcaggcatttggatgaaggttacactgatattaaggcagggtgggggctgggctggatgccctgaggcctctggagaggcagtcgccctggtggagccatcactgtctcagagccctccagccctctgagccctcgggttaatacacctcccaggagatgggtctgtacacccaaattcccaaatactcaatgtcacacaaagtcacaagcactgtgtggattgggctattctgacagcatggcccgtgtactctcctcccggtgacagggggtcaggggagccaattaatcaaaatgctgttggagggaatggaactagaacaaggggaggcgaatggatggatgacccaggtgttttgtggcattggcctgtgatggcccaataaatccacctcagcgatagcaacagccgttgagtgcttttgcttcctctgtgttaggtatggtgctaggaacttcacatagattagttatttagacctgacacctagctggttattagcctcgttttccagaaaaggaaactgaggcacagagagatcaataacttgcagtgttacagttagtgaggagctgggataggaatggaggcatttgactccagatactgtgcttataattaccacacctcctacaaacagcctggctatgggaccggaattccctatccaggggcctggttactccctcctcggggctgtttctgggtgggctctgccacaacatggctttttcctgtggttttcccaccaaatccactttcggttcatcggcacactcagtcaagttatcctggagtcttattggcctaggacccatcccgtgtcctcaagatggcttgagttctcggtaccatgacccactccatgttggtgtatggttcagctctcaggcatcagcctatttccttgcacttggggtccctgagggaccaactgtatacattacccttgttgacaagggcattcattttcatttgatcagcaaaggtatcttccttctgtatctaggaatttgaagctatcataaacatggaaagactgatgctaatctattaggtttagataacagaaaacatcatagaagaagggtttaggaggatctgttttaagaaaaaaaggggaaggtggggacttccaaagaaaagcttacctttggaaacatcctcaggtttttcctttgaaagataagcaaatgttctaaccagggctgtcccctcaggtaagaactcagagaagaacaaaggattccaaggtatcactgggagagggtaacagtttgcctctggataaccttgaaaccagctatagctgatggtcaaaatggaactgggaatgaaatccctatcatagatacagaatcccttctgactttttgtagtttttagagaaattcttttattttctcaagaccatccctattgtgccattgcctttggggctgtgattgtcacctgcatttctttttaatgggctgatgctgtccttggaatccctgcccttatctgacagccagggcccctctgactgggcactgatgctctctgcccagaggaagatggtgttcctcgggggccatgagacccctctgcaacatcacagctttgctcttgtttctctttcctactaaggcttccacattgtcaaaaccatgtatggggggagcagattttgcagccgaggggaaaattaccataaaacctagtctccgtaggtggtaagggatcaaggagcataaagtagaatgcctatggctaaacatgtccatgcttttcttaccttttcctttatttccaaagctactgctgttggcagtagaatagacatcacaggtgaatattcagtttaattatgggtttacatgtggctaccttatggctcgctgtaaggcaagaatgcctgaaatgtttagctggcattctttgtgtttctagataaagcaaaacatgtgctatgcatgctggacacgccccgtgccgtcttctgtaataaaagcagcaaccatatggtactgccggaaccttccagtatctcctataaacctcaagagccttgcagatctaaaactgcatagagagcacagatgctctggctggggtggcacaggtacacaggtggaagacaaaggtcaggccttatcgtgctagagcttacatcaggctaattcctctaccattgccaaaagttgaacttgactcacaattgtagagtcagcttaaggaacaagacctttcactgggttggatgtcgactttttgcatgtgaaagccagccagtattgcttatgccaactctctgggctaagtcccttgagaattagtttaaaaatttttgtagagctatagctccactctaggaatgtgaattcagcaagtttaattaataataataataataatgtcttattccattcaggctgctatcacaaaataccttagactgggttatttataaataatgggaattgatgtatcacaattctggaagctgggaagtacaagatcgaggccccagcagattcagtgtctggtgaaggctccgtctctgcttcatagatggcacttctcactgtgtcctcacatggcagaaggagggcaggctgtgtcctcacatggtgcaaggagcgaacttgctccctgtcatctcttttataaggctctgcgtttggttgaaggttatcccgaaaggattacttcccaaaggccctacctcttaatactatcacaccgggaatccaatctgaagatatgaattcagaccacagcaaatagtagcagcagctcacagctattcagtgcttcctccacaggaccgctttctaagtactttatgtactaacttttattcaaatctgtgaagaagttgactttattatccttacgttatagatgaagaaacggagatacaaggaaatgaagtgactcacccagagtcacacagatggtaaattggatggctaaatatttaaatggcacatgcggagagaagatattttgatgacagtttccataagaattggaatctatttttaaagtacagttatgtgtgtgaagggaatccaatgttaagtatggaaagtcaggctcaaggaaataactaattagtaattacatctttaacatttttaatttaaagtaatttaagattttcagaaaagttgcacacacagtacagagttctcgtacacccttcacccagcaacccccgatgttaatgcccttgtataactatagtacctgataaatttatgaaaaataagtgcttacagccaggtgcagtgtctcacacctgtaatcccagcactttgggaggccgaggcgggtggatcgcttgaggtcaggagcttgagaccagcctggccaacatggtaaaaccccatctctactaaaaatacaaaaaattagccaagtatggtggcatgcgcatgtagtcccaggtactcaggaggaggctgaggcaggataatcggttgaacccaggaggtggaggttgcaatgagcccgagattgtgccactgcgttccagcctgggcgacagagcgagagtccatctcaaaaaaaaaaaaaaagaaagaaagaaaaaataggtacccgcattagttactaggaatttttttaaagagccaaatagaagacatcagactcatcttatttcagtataaaaggaccacaagtggtactaagcagagcccccttggggcagtgcttgccaatgatgggtggcacccccatgcccattatctgcctgcaccttctcccaaccaaatagttcaggcatgggtttgtcttgagaaatgttttcataccaatagctaccatttattgagtgcttgctctatatttattgttcataggactggacctttatgctcagcattttatattcattgcttcattgactccccaaccaatcccatgaagtaaatactattattatcctccttcttgaaatgagcaaaggagctgagagaaaggaaggaaatggctccaagttacaaggtggaaagtgatgtagttggggccgcagcccgggcctggcttccacactcttgctttcagtgcataggctatgaatgttccaagtctctcttattaattagagtctcctttggaacaaacaattaacccataaatatttgctgaacccacaatcagcaccccacaaagttttttgaggtcacggaaggtccaaacatgggacttaaaaccaggggagaaaagagtaacacaagaagagaacaaagaacaacccatatccaagtaaaattaaataccaagtacatggtgatgaaatagcacacccttgggaggtactgagggtggggaaggggacagagagggaaggaccctgtggagaagcagccgactgaatactgtaggtatttgagagacagagagggaagagagctccgattgagagagtcagagggctgtgggaattagcctggtggtggctttcatgagaacacaaatataaaccataagccatcacatgcagagtttatggtccagatgcgagtgatttctcagaaaatgcacttaaacctgaaccctgagcagctgtgttaattgctaggttagttcaaactgtgtcttacctatgtagaatcactcaggttgaagataattcccaaagtaacgtagaaactcccgacaggagctctgcttcaggatggaaacctccgtttgcagtcagagatgagttttctttctagcttggtggggtatttatgggaaagccccgagctttggtggtgtatttttattttttgcctttgggcggtggtgctgatattatcagaatggtgtcggggtttttttttcttcttctgataggagattgtaataggttttctacactctagtgtgttttgtaaattcggtttataggagtagtaaaaaaaaaatccctcatgggaaccaattttcaatttaatcttgtaagtaaatggaaaaaatatcgggtgctttagagctgtttcaggagcacgtctctcccacagatagattattctgaagaagagtctaattttctcaacaacttgagtttgttaatttggtgtggagattgaagttttaaactgaactctggtcggggaggggaagacttcctcccagctcttacggcccagagactcctcctgcctacctagggccctgcgcgatttgatgtctgtcacccctgcagatatggagactcaccctcatcttattgtaattaaaacaataatattccctctgtgtgttcttccaccttaccatggtgtatttgttacagaatgaaggaaatgagcctcagctttgtatgataatcgttcattttttttgcttcacccattgatcatacattattgagcgtgtgtcctgctctcttcctggcaccagggatgctaagatgattaagacctagaccgtgtcacagactgtgtggtctttgggggagaattcaggcatgaaaaagaattggcgggtgctgtacctgcagtgggagtttgggagaaggggagcctcagtggccctggggaggcagcaggtgacagcttcacatcggaagtgcagtggagccgggaggacagggaaggaagaagagggcattccaggcaaagatgcagagtgtgttcaggaagctcagcaccatccaggatgtcaggaagttcaagtgagagttggagagagctggagggaagtttgtttctttccattttcaaagtatgagagctgcaatcatcagtttaccagttgcacaatccttaggagccatgcgcacaggctctgagttaaatatttctttttaaaacaggaagattttaagttccaggtagctacgttttcaacaagaacagagcatcagtctcctagcctgaactctacacatcaccctgagattcacagtgagcagagaccttctctatcattgctgggtaaggagacgcagcaggtagcccaacctttgcctaaaagctttgcacaggtaccttttgcagtgacaggcaggctgtggaatataataacttgttggaggctgccagcaaggagatgcaccaagctccttatttaaaggaaaaggcattagttggaagtcatttctgttcaataaatcttggttatgggatttggatccagatcaggaacgtagatggtgatgcagcagatgtatctgctcctttggtttgggatggagagggagagggtgctggcaagaagctgcttatcctcaggggcacccagagtgtccactgttggtgatcctgcatttgaccacctggttcagcgttctcagcagatccctccaactgcaaaggtatttttgttgttgttgttgtttgtaattaataaggaatctggatgtcatacttgatgaacagcaacctcccacctaatggttttaaccttgattattttattttttatttatttgtttatttatttttttgagacacagtctcactctgtcacccagcctggagtgcaatggtgcaatcttggctcattgcaacctccgcctcctggattcaagcgattctcctgcctcagcctctcgagtagttgggattataggtgtgtgccaccatgcccggctaatttttgtttttttggtagagacaaggttccaccatgttagctaggctgatctcgaactcctgacttgaggtgatccacctgccttgacctcccaaagtgttgggattacaggcgtgagccaccgtgcctggccaaccattcttgattaaaagagaatgaggagacatgattaccaaatgcaatctgtaacacttggttggatcctggatccaagaaaaaaacagctgtaaagaacattttggggacagtggggacagttgaatctggactgtattttagagaatgtttttgtaccagtgtgacatttctgggtggtaatggtcatgtgattttggaggggaatgctgaaatattttaggggtcattttttcctaatgtctacaacctacttccaaatggttcaacaaaagcaaaaaaacagacagaaatctgaaaataggaccaggcgggggttggggccaagaagagagcgtgtgtgcaggcaagagcacctgtggcggaataatagtgactctagaaagtgatataggtgttcactgtactgttctttcaacttcactcccaaaaacttgggcaatgatatctatgtctgaagctttgtttcagttgatcgtatttaaatgtactctgtagaggtcattcttggctagaaggaagcccctgctgaagcagccatcagagcgcctcagcagttaagcttccctgcctccaccctcttactctatgaccctcccctgcctctgtccatggccaccaacgcctttccttttgtggatggcagaccaaaggagacaattattctgcctcaacccaacgctgtgtttccttgtggttctgcactgaggctgggcccagaagcctggttcatgaagagcactcacctggcccctggcccctggcccccgttaaacaggtgagtcactgaccatttccttagagccacctgggactggctgcatgggacttgccatgacacagccggccagactgccacaggcaggttctgggaactgtacacttacatggatgggcaggggctgcctgggattgggagccactagtggtctatgtccccaagagcttgtatatgacccccattttccaaatagctcaggcagaaaagaaaatgtgagttaaacagctaaaggagtcatatgtaggtatgtgtacatatgtgtaagaagtaggctggacatggtgactcattcctgtagtcccagctactcaggaagctgaggcaggaggatctcttgagcccaggagtttgagacaagtctgggcaacagggcaagacctcgtctacacaaaaagaaaaaataaccagatgtggtggtgtgcacttgtagtcccagctactcaggaggctgaggcagaaggatcgcttgaacccaggagttcgaggtaacagggatctatgatggcgccactgcatgccagcctaggtgacagagcaaaaccccatctccaaaaaaatagtagttgtgggcacagtattggcaaagctgttgcttattgtataaataaacatcaaggagttggggaatggctgagtgggccgtttgcattctgcatctcccctccccttggataccactctcctcgatctgggggttccatgcctactttaaagacaccagcttctatttcctgcaagtttccagctcttaaaaaaaaaaaaaaaaaacaaaaccaacaagctttatgatgctcacatatgagaaactacttcctttagtttgtctttaaatactggtagagaaaagtccataataagaggggtaactgctcttcatgacaaagcacactttatctccatggctttgtagaagtttcatgaatccactaacatcagctaattctgaaagtgataggcattgttgcattaattttccctggggagaggcacagcaagactgggtcctctcttttgtagatggagaagtaagaatgagtggggcgttcagtgttcttgcagagaggattggtgggtccgtttagctaggaagtggtcgcaccatctagccaggggacccttattatccaatgatctctatgtgcctggcatcttgcaaatggaaatgctaacaagatccagccagtcacagcagtagcagctgcctagaaaggggacatgaagggcaaaccagagaagctccgggtgtttcttgaatgcttagatcctgtgagaagagaaaccgacactgattgaacacttttcgtgtaccaggccccaactggatgctttcctatgtatttcatcccaaccaccttttgggaaaaatgctatcatcatcaccagcagcagcagcagcatcattacccttttgtaagtgaggaaactgaggcttgtagagctcccgcagcctgcccagctgcctctagcacacacgcatgcccttcccactattgtaagcagctgaccgttggctctggctgagggaagatcctgtgattactcacagctgtttcccttgagtacagacacagcctacactgttgcttcaagtgcttgcaatttcacatttctatcctgcaattaattgtggaggctactctgggatggctccgcagctcctgtgattactgttctgttggcaccactgggggtgagggtctgtcctcacttccgcagaccctgcattttccagggtttccataatggctggaaataaaaatggcagcagggaatctgggtgaagtcttctgtgctggaaaatgaagaattaaaatgggcagaaggatggaaacaagccgctacaggacgtgttttgacagcatgtgagttgcgtgggcatgtgactggaccagccctttcttggcatccgtctggctttttcttagtggccccagttcttccccattggagactcatcctgctctcacgttctcacagtcttcaaagaaaccaaatctagcagtcacctgccttgagttcactggtgcttaacatccaggcacatccttggcacaagaaaacaggaaagtgcgtcttagctaaaacatacagcggtgtgcttgtaccagaagaaagcctgcacattatcccattcaaatgcgtatgcttttgggtcatgactggcatgtgttcagtggatttatctactctatcttcttccttgattgggcattcctaaacatcagtgtcttatgtccacatgaccccttctgtaggcagtactttgcccatctccccatatttaccccttatgtcccctacacgtttgcactcagatttccaagccatgagcagcttccccactgtggcaggcaacagcccaccagtgtttcttccctcctcacttttgcttgtgccattttccctgctccccagagaacgtctttttaacattcagctgcagttacctttaggaagcctctcctcacattttatgccatgcctgaaaccaaccactttctctccatgccctttataacatgtattatgagatttcacctgtgtgtttatttacatgttgatctccttccactatgtcataagtcctttgaggtcagagatagtgtcttatctcctgtacccagcccagtgcctcaaatttgtaccaaatgtgtgtctgttgagccgatgatgatgatgatggaagtacacaatacagcatagaaactgactcaggcttttactgcactcctcaccccaaatccaggtgactctccccattttagccctacatctggatcaagttaaaatgatcctgttttaacccaattcataaagccacatggctctgggatcctttagagaaacatctatcagctaagaaaaaggttgcatcttctcagagacacatgattatttacattccgactgtggtacctcgtcctgactgatctgtggctcatcttaatgtcagatatgtacagacttgcagcatgccatcccacagattgttattcatgcttggttctctgtgcggggactccaacagagcttttcactctgggtgcttagtcactagatgtgcgtgggaggcagcaagattggaacaaggggcaaagagttgccagtgtcatttccttcatgcagcatttgtctttgttgtaaagcaccctggtatccatgctcatggtgacatagtttctctttctcctgcttaagataccccaagtccccagattctttatagggtcatcagtcatctgtcgtctttgacttcagtgactgctgccaggaggaagcactcttaaagataggctttgaatgcttacatccctggaagaggagaagcaaattatttctggggcctctttcaagattaccccattagcatacagagacattgatattgactgagcaggtcattcttgtgcaggattttaattgcttctaattataggattatcatttaagcacaagattaattgctgtgaaattattgcaaggaactttatcttctggaaagtaaatgtgttagccaagtgagaaatctcttagaagcttgcaaatgatgtcttttcaatcactttccattgaaactttcttctaatgcttggggaatgagagagagatcttgggggatcaggagggaagacgaaataaataacagataaatgctccttttgtttcccggttctccatcaaaagggtggaaaacttgaagtgtttgggaatggttatgttcaccaatggaaatgtcctaaaataaatgcagaaatttttttcctctcttgatccatgtcatcttcaacggtgggtgggtaggaatggctcagtaggaagctagaataggcaggtgctgtcctatggtccttttcaacaccaagctgctctgatatcttagcaaaaaatatgtatatatatattttcagatgtgttgtaaaggaatctcccattaacatgtatacacctgctctgattattggcatcaaaatggtacagagaaacatcagactatgtgcatcttagcttgtaggcgtttccaattggaaagattcagatttcctgagaaaatatgagataagttagctcctgagcttgttctaaaatatccccatttgaatagggggccatggccacccactggaagctctgcacagagcatccccatgagggactttttatactgagaatggtagctgcctttacatgcattttcctttttaattaatgcaaggtttgtggttaattaaagatagtcagggtcccttttcaaaccaaagcaggcactttttcctagaataaagaagagagaatagaagcaaggcaaacttcctataaaagtttttgcagtgggggtggtgaatttggggaatgtggcctgaaggaagtgttgtttcatcaacttcgactcacttgaggtagggaatgtaatcaaaagagacaccttcctcactgaacacccagcagggacatggctctttttctgggaaatgccgcactgacctccctttctctttgttaagtcactcagctgggagtgggggtacagtgcaggagagacacatttctctgggatatattgctgctgtcatcttatggcccgcacaggtggaagaactctcgtggaagaactctcacaggtgaacatctgcccaaaagagcaagtgtatgtgcagtgaatgttagaaatagcaccagagccctccttactctttactaatacccaacctctctgaaagaccctgaagtctgtttcaatccctcccaccccaatatggcagggactctgttatccttaaaacttctggcttctgaaggatgctagtatatatttgaaaaacaaaaaaatcccagcatactttacatgaccaacactccataaagaaagaatacagcaggcttgtgtttataaaataatagaagtgacttgcatttagaggatactatggtgcattagtctattctcattctgctatgaagaaatacccgagactggtaatttctagaggaaagaggtttaattgactcacagttctgcagggctggggaggcctcaggaaacttacgatcatggcagaagaagaagcaaacacatccttcttcacgtggcggcaggaaggagaagaagaatgagagcccagtaaaggggaaagccccttataaaaccatcagatctcagccgggcacagtggctcatgcctgtaatcccagcactttgggaggtcaaggtgggcagatcacctgaggtcaagagttcaagaccagcctggccaacatggtgaaaccccctctctactaaaaatacaagaaattagctgggcatggtggcagacacctgtaatcccagctacttgggaggctgaggcagaggcaggagaattgcttgaacccaggaggcagaggttgcagtgagctgagatggcgccattgcactccagcctggacaacaagagcaaaactctgtcttcaaaaacaacaacaacaacaacaacaacaacaacaacagatctcattatcttcacctcgtccttcctacaacctgtggggattatgagaactacaattcaaggtgagatttgggtggggacacagccaaaccatatcatatggcgttgactttgaagtcaggtagactggatttgaatcccaactatagcactaattaatgttgaatacgtattaggggttgttactctattaatggagttttactccagtcacgttaagtcatgtagctcaatggactgaagcatgtcactttattgacaaattaactctttcagtcctgactctttcatggtgtagctataaccacagtgggactccagcagccccaaccaagaaaatctaaccccagacctcatttgttttttcttcactatgcccaccaagcaagacacaggaacacactgtgaaatcactttcaaaattggaaggcctctgtatgagtagaacagttgcatattaagctgaggatattaaccttaaagattttaactggctgtgaaccttgacctcatggcttaacctctctttgtttccctctcctctgcaaattcagattaaggcacttgaactacatgaaccctgacgttcccttcagctctggcattttgttgagagctgtttcagagagagctaatcggtggtgccaataagtgtgccccttcgtgaggaactgatggtagattggagactctagggactctgcaaatggatgaggcctgagaggctgctggtccggtgattttcaaacaagttggaacatcacatcttgtttgagatgatattcaaatgatatttcaccagagttactctgattgaagggaagaaaatagggtactcaccttcttcctcctcctccaccagccatgaggagactctgtggagcagagtttgaaagtcaaggatgtaggctgggtgtagggcctcacacctgtgtcccagtactttgagaggcggaagcagaagatcccttgaggccagaagttcaagaccatcctgggcaacagaacaagaccttgtctctataaagagtaaaaataaatataatttaaaaattaaaaataaaaattagccgggcatggtggcacacatgctgcactttggtcccaactactcaggaggctgatgtgggaggattacctgagcccaggagtttgaggctgcagtgagccaagattgcactccagcctgggtagcagagtgagactccgtcacaaaaaaaagaagtcactaatgtgattgttatcacactgtgctggggtccgtgcaccccatgcagcaaagccaaatgctgatgttgggttaacagcaggagaaactgaggcgtttattgccaagcaaggagaattgagcagctcgtgctgatgacttgaactggcagatagcttacagctatccattatttaaaggcgggaaggtggaggttacagtcgaagtcattcagtacctgggggccacatgttggtttgacccaaacaggtaggacatcccaaagctggggaggcggtgtgccacagtcatggctggattcaaagatcttctgatttgtgattagttaaggaggcgaagctttgtctaagaattagggatcaacaaaaaaaaaaacaatgttagctctggcttttgggtacaaaagcatcgaagggagatggaagaatgtagaacaaagaacagcagtcagagtgctgtcttctgctccccccatccaagggctgtgtgccagtgggtccgtttggtgggggtccagttttctgaaacaactcaagggcatgtgtttagatgttatctttaatttctacagaaagcaaaacatctcctaacttccttgctgttgttttaacttactgataccttcttccttgtcaagttgctcatttaattctcaaggctacctaggtgcctggaattttccttgaaggaactcaagattttcctttatttccatgttagggggtgctcctgcccggggaccctctgaaaattctgtcccatggtccatccccttcattttcatgcataaaaaccacggctcagggaatatggctactatgtagggtctttggggttataaaggataaaaccggccgggcgcgatggctcacgcctgtaatcccagcactttgggaagccgaggcgggcggatcacgaggtcaggagatcaagaccatcctggctaacacggtgaaaacctgtctctactaaaaaatatatatatataataacaatacaaaaaattagccgggtgtggtggcgggcgcctgtagtcccagctactcgggaggctgaggcagaagaatggcatgaacccgggaggcagaacttgcagtgagccgagatcgcaccactgcactccagcctgggcaacagagcaagacgctgtcttaaaaataaattaattaattaattaattaaaggataaaaccaacccactcaggtagaagggggaattagcaaaagaaatctagagtatcgtgaaacgcaagggtgggaatgccttggagccataagaatactgagaacccaagattctctttctgtatctcacctcttctttctccatactgccttcatttgtttcttttccacaacacgttagactttctttgcattgcagaaaacatggccctagacgattctacagcttcgcctcttgcagctgcatgtcttctactgtgtcagtcacaaatccaaaaattctgggaaagggattcatcgactcagtgtgggtcacatgccaccctggaccaatggactgtgactggagggcagatatggggtggggtgggaggtgggagacattttcaggaacaaggaatagtgagaagcagacaaaactgtaggtaatgcaacactgccatgaaacgtgagccagggttgtgcaggaagtgtgttcaggaggaggatgcagccaggctcctgccttctacttcgatgctcctttccttcaaccaccttgcacatccgtgaaattactcaagagggacagtggctgagcttatgtccaaaagttggatatgactcatcagttccttttgaacacgtcaacctgctcctggcctggctggtctccaaaaacagccaagggtaaagaaaaaaacttgattgagtgacatttgtccaattcagccacccagtgcattaatcaccctttttatttagaagctgtaaaacagcacaacaggttccaggcgtaaatggtgttgatgtggaagagattgagtgatggtggtacccgcaggaagcaagtcctttgaatgggctcacggggagattgtggaacaagtggctcaggaaggtggagctgtttgatcagggcctaggaactagacaaggccctccagaatgcattttgagccattggccttaaacaaccttcccctgcggcagctttttctgcaggccacgttgctgccttggcagaccctcaccccttacccctggagcttttctttcacgaggaattcctactgcgagaataaacaaaggtagttggcagcatgctaacaatgcctccaggttcttagcctctgtcctgagaagagccagccaggcaacctggctttcattcagcaagggaagagaaaagcaaggtaccttttatccctgaatcatcgccacaaggccctctcaggtcaggaaactgatgtgtctcctgcttggtttgtaaaccatgtggatgatacccagaatatcaggtcctctctctctcttccgtccaaacgaaagcacttagatgtcacatgcccaccttgtaagtcctcatgggatttgggatcctcatcctgtgcacagaccttgactcatgggctctacaacattggctgtcttcctgtttaatttccctttctactgacagttttgccaattcagtgatggctttagcgccatggctcagcggcacccaagcagcttgagacatccgtggtttgggggtcatcttagttatttcatggaatgaaaagttttacatccaagatactcggcccccagtcatttcttttctgtatcaatttagtctctctttagttttggtgcatgtggttgacttgtggtagtctaaggtgttgacggactggcccagagagagatctcaaagctagtgagaatgtgtccaggttcttgtttgattttgttttggtttgattttgattgtggtcgagataagaggcttttccaggtgaaaatctcgtaggcctggcatcatacctgtaattaatgtttatcttctgctttatactctcagattaaagacagcaatggtataacagcaaggctggaaagaataaagtttactcctgttttatctctctctccaaacaccgtagtgttccagagacagatactgatagtctcttgtgctcatgaactcctagtagctcctgataagtacatttctcagagaatcagctctgagcccatttgtggggaacaagtgtatgggaaagtcgtcgattctgcaggtgttgggaacagttctgtaatgggatagcagatccctcttctgctggcggatggaggaaggatacccttgccggtggacagttgcctcctaatcaggaattatgcctcatgctcagccagggccttccaggcaaggaagccgagcaaagcccactggaagacagggctccctcgggcacaaacaagaacagcttcctgctcctctccagcctcaaaggttcatgcgccttgtccctcagataaaggtgctagaaagaaggttggtgtcactggacgtcgtctcttagggtgattcagctacttcaggcgaggggttgggaggaaccaataaatatttttgtctttgtttgccacactgatgtgaatgcttataattttattagcagctgcctgggagccaggcctgacttaatttaatttaatctcctgggttatttcagttcggtttagtctattttaagcacagatgaagaggaaataatcagaccgaggggaaagatgagggaggggctggaggggccatccgctgccctcgctagttcctcaggcttaacttgtcttgatataaagggaatgacttcatggaggcaggttagccagacgaagttctagctctcactgtgttttgtctctggtatcatcaccttgttctctaagaaaagaagcatgatatcagctttgttgggggagggaggatgggggatattaattatgccactagaaatacaaatggagcaattttcttgtgccaggcaggactgaatagtgacaccttccccggccctccctttctccttttagcaaactcactgatcactgtgttgtggtagctctttctctttggagtgttttttgttgttgttgtttggtttgtttgattttggggtttttttttttttgagacagggtctcactcagtcacccaggctggagttcagtggcgtgatcttgactcactgcaacctctgcctcccaggttcaagtgattctcgtggctcagcctcctgagtagctggaactacaggcacatgccaccacgccctgctaatttttgtatttttagtagagatagggtttcgccatgttggccgggcaggtctcgaactcctggcctcaagtgatccacccgcctcgggctcccaaagtgccgggtttctaggtgtgagccaccgcgcccaaccgtctttggagtgttttgatgccctgggattggtggtttgggaggcaggatggcagagcctccgctttgagcagtttcttctgagtgaatatgtggttcagaggcccactcagcgaagcccaaggcccaaagaccaccaagtcctgtggcctgggctgccctgcctgccctgagcccaggagctgcgtcccaaggccaccccatcatttcctgcccccagggcctgtgaggctgtgcatttggtttagtaccaggaatcatcaagaacaagagaaattcatgggcccagtcagagaacccaaaggtaatgagaatgtccagagggtttttttgttttaaacagtgattgagatgataagaggtattgccaggtgaaaatctcttagccttgacatcatcaaagaagagagattcgtcatctcatgatgaagagagattcatctcaatttcttgtttctttggggtttttgttttgctttggttttttttttttttttttttttttttggcaatgtcttgctgtttcactcaggctggagggcagtgttgcgatcatagctcaccgcagccatgatgagctgccgggctcaagtgattcttctgcctcagcccctgtagctgggactaccacacccagataattttttaaatgtttgtacagatagggtctgaccacattaccaggctggtctcacactcctggcctcaagcaatcttcccaccccagtctaccaaagtgatgggattacaggtgtgagccactgtgcccggctcattgcagttttatatgccaaccctgaaagcagaaaattgtatccccactgaagtgctggttccatgaacccaggatttttatgggtcttattcattgcagaatccccgaactcatggtgcctgggacccagcatgttctcagtgtgtgtccgaataacactggagggttttttctggatgatactgataattacagaagttaagagttattaagtgcttattttgtgccaagcactatgccaagggttttacttgtataatcttttttaatacttaaacggttcctattgcatgaaactcttaccttcatttaaatggaggcatagaggatttcaggaacttgccaggtgacaaggtggagctagaacttgaatctaggcagaacatttttatctgtgtcctgagagtttccatgagaacatgaccaaaaggttttctggtatacgctgagtcacctgcatgagtgttcattcagaaccatcctcccaacaccctgcacagtggagatgccctgagaagggagcatcgctgggcttggggctgagtgtaggagtggcaagagggggtccaagtacctcccatggctcattaaagtcacctgagtagacctgctaagcactcactcctccatgccggatttctcaaagtgtgctgctggtctacctggagtggggtagagtacttccccaccccaggcttcctgaatcagattctctaagaacaagcgcagagcctgcaagtaaattctattgttagtgagttctccaaggtggttcttaggcacctaacatttgagacctgcagctatgggtatttttgctcctagccttgcggtatgttagatttacttaaaaacatacaagtgtctatatgtttgggatggtgttggagggaatttattaaaactagagttcttctttatccagaaaagcacacacattaggaaaggcaatagcatctgaagacagaggagtggcgtgtagctcattttggcctttcctgttgaaggcccccaggttcactcttgggatgaccaggcccctagagaccaattccaatgtagtcctgactgggcagtccatcaggatgccagtttatgaatttacagagaacaataaagttgaccatgtgacttgatgagagcaatcagtgtagagaagataccaggcaaggcataatgaacccattttattgatttgtcaaattaagcaccatcacatagactacatagagcagaaatccgctttgggagtgccttctcccctacagacaaacctgaggggactcagaatgctgcctagcaaacatagaattataacaaggggatgtgataaatgttggatggcagcagactaaggtttaacattcatctcaagttagaggcggctgctgtgctgctggggccagaagcacttgaagtcaaatgcttagatgccgctccttggacctgtgtcataggctctgctgacatttgcctggagcctctgctttctcgctgctcatttgaacatattcatactggacacaagctggtcctacaagcctagtacctctcagaaccctctctccttcaggggactttgagaagctctgctctgatccaatattgatgaatccagtagtttgttgatttccaaagaaagatcttgctttcctcatttcctactacccaaggaagggagaatcacctcattatggctccaaatttcaacagatgttatataaagggctatataagtattcctgtatcttcattctttgcaaaaatgccttccccaaaatctgactctttgtctgtcagataaatgatatgtagaattttgtatcttaccttctaggagaaagagtagtcgtaactctccatgcctctccagggaaccctttgaatcccccccccacacacaaatttagagattatttccaggacaaaggactatatgaaggacccttaactatctagtacccagactagtaacgtagactttggtgataccatgaaaacgaaggcataatcatgtgctatgaaaatggattaggaagcagcttctgttcacagtagaaagaatcttagagatttccctgtccagccaactcctttgttttccagactgaatataaaaactcactaaagattgcccaagaaagtgagcagcaggacagagcaagccgaaggtccctgcccagtcccttcccccacctctgccaccttttaaatcccatctggaatgtctgcgtgtttagttcagttggaggttagggatctaggaggtaaaatggccaccaggatgatgtcaaatcgagttaaacagatacagccttggcctttaaagaacagaccacactggaggcatatgtattcatccgttcttacactgctaataaagacatacctgagactgggtaatttatcaaggaaaaaggtttaattggctcagagttcagcatgtctagggatgcctcaggaaacttacaatcatggtggaatcttcacatggcggcagcaaggagaagtgcagagtaaagcagggaaaagccccttataaagccatcagatcttgtgagaactcactcactatcacaagaacagcatggaggtaactgcccccatgactcagttacctcccaccaggtccctcccacaacacatggggattaggggaactacaagatgagatttgggtgcagacacagggccaaaccacatcaaggaaccacattcaaaagccacccacacagggacaagttaacaacatgaaagcaaaggtaagagtgtctgccatgagaactgatggtaggcagcttagatgtgaagtgagtggccaagagtaatttattcctcttccaattaaccagactttctagaaacagtggaattccaagagctacttaagaaatcgagatatccttgcatttctggattgaattgcggtaaccagttggtaacctctgaaatgcaatctctcttatgtccctctgaaatgttaagaagattcaggaagtgacagaaacccacgatcaagactggcaaaccacttactgccaccttggagaaatttctgttgcccgttagcccagtggtcaagtgttaagaaacaattatcagtggtctggccatactggatgcatgaaaaaaccaaagtcctgcacacctgaaagaaagcaagaagattttttgggcctccccttttgctcagataaacagggtcttcgaccagccaaaaaacctgggaggcactcctttgctatggagtttctctcatttcagaggaccaaaatagtgtcttctctcatctttccatacagtctacaaatagactgtaacttccaaaggaaaaagaaaagggctgttgttggtgagttatgtcctgagggttagcagctctgcaagcgaagtatagtggacacaggtgtggaggtgagaagaacttcagggtcaggggattctaactttaaacggacttcacagattcaagatgtgtaattaccaagcactgtgaattggaattaccaagcactgtgaattggatatgatcctacctggctccagcaaaaacacactcgtcattggactaagagccatgaacatcaacttgagtgccctggaagagggaagcaagttctctagtgtcccagtagacagtggatagagccaatgtggcatacaaacagtatctttgggcaaataacacatctagatgtacttgtctttgaggacaagtaaagaaagaaaacaaacccaaaatatggggcccatttttaaaacatgggagataaagggatagtatcatggagaacatatttgaatatagattattggaagaaaagaaattacagaagagtatttgagaaaactccatacacattataatagggtgcaggaggctgggcacagtggcttacacctgtaatcccagcactctgggaggccaaggcaaaaggatcacttgaggccagaagtttgagaccagcctgggcaacatagcaagttctgcctctacaaaaaaatttaaaaattagccaggcatggtggcacacacctgtagtcccagctactcaggagattgaggtgggaggattgtggagcccatgagttcaaggctgcagtgagctatgatctcatcactgcactccagcctgagtgacatagtgagaccctctctttaaaaaaaaaaaaatgcacaatctctgtaaaacaggaacataatgccatttgaacaaacaggttgagaggaaaagcaagcagaatgagattttttaaaatgatagtgggctatataaagagacagaaaagatgaaaggaagtggacaagtaaatgccagtttccagtaaggaaatttatagtacataattaaaatctttgtggtgcaacaaacagcagaattggcattgcagaaaatcaaatcagcgctgtgcaagaatcctgggaagctcttctagaatgcaggcaaaaggacaaaaccatggtgatgaaagagagaataatgaaaaatggaagactgggaacaggatataaattgagaataatagctttgtcccaaagataaaagaagaaaaaattgaaaaagaagcactaattcaatatgataggaccaaatttatggagcattcaaatgaaaaggaatgcactctgttcctacaaaattaaccaaaagaagtctgcatttagaagcattctgggctgggtgcggtggctcacacctgtaattgcagcactttgggaggccgaagttgggcagatcacttgaactcaggagttcaagaccagcctgggcaacatggtgaaaccccgtctctactaaaaatacaaaaaattagctgggcatggtgatgggcgcctgtagtcccagctactctggaggctgaggcacaagaatcgcttgaacccaggaggcggaggttgcagtgagctgagattgcgccactgcaccccagcctgggtgacagagcgagactctgtctcagaaaagaaacattctggaaaacttttaattacaaagaaagaaaacaaatgtcttttcttcagaatatataggtgacctacaggagaacaaaaaccaggttgtcactagacctctaatcgtatgcactactaaattttaagagataagaaaacatcacttacagagtttggaagaacaaagtgaattggccccaaatttctcacccagccaagttgccagtcgtggcatattctcagagatgcaagagctcagaatatacatcacccacactttcttgaaaattatttaaaggcgagctaaagaggacggcaagatgaagtaaaattaaaagttcagggatgggaagtcatataaggataagcagtaagcactaaaatcagttgaacctgttaatgtggaaaacagctatcaaaactgtaactcatataaaaattatgacaagcattagagatcccatactccagataattttacagtaacaaaaagaggaagtaggatgggagctcacagggagtaagaacagagcatgcacaatgcttcatacccttggggagaggagtcagaagatgctatctcattctttcctttggtgatcggagaaatgtaggataaaaaatgttttggggtgaatcttgagatagtcagcagtagaatttaaacaacattttaaaaattttggccgggcattgtggctcacacttgcaattccatcactttgggaagctgaggtgggaggattgcttgaacccaggaattgaagatgggcctggacatggtgaaatcgccatctctacccaaaaaaaacacagaaatgaccggtgtgatggcgtgtgtctgtagtcccagctactcgggaggctgaggtaggaggattgcttgagcacaggaggtcaaggctgtagtgagccatgatcacactactacactccagcctgggtggcagagtgagactctatctcaaaaataaatttaaaaaaattatagaaaaaataaatgcaaagaaaacagagtatagtaaaagagtgaaggctgggtgcaatgcctcatgcctgtaatcccagcactttgggaggccgaggtgggcagatcacaaggtcaggagttcgagaccagtctggccaacctagcaaaaccccatctctactaaaaatacaaaaaattagcctggtgtggtggtgtgcgcctgtaatcccagctacttgggaggctgaggtaggagaatggcctgaacccgggaggcagaggttgcagtgagccgagattgcaccattgcacaccagcccaggagacagtgggagactcatctcaaaaaaaaaaaaaaaaaaaaaaaagactgaaaacaaagcaagtaactaggagacagagggacaacaacaagtgaagctccacacgacagaggcagccaagaagtgggggggtttaagaatgtactggaatggggctgcctgtgttttcagcccctccccttgctagctgggtgaccttgtcctaggtactgcttaatctctccaagcctcagctttcctcgtctataaaatgtggataccaagtagggttattgcggaggttagttaatatgtccaaggtgctgagtaccttatcaggtacgtacttgtgggtacgaatattgaggataaggtaacagattaaactgcccaccattttcagatgggatgttttgctaaagttcagcgatatcctatgaatgagacctacacgtaaagtaaaatgacccataaacactgagaaaaaggatgggcagtgatttatgagatgaaagaaagaaagcagtggaagtagaattgccccaagtcaggaaactctgtgtacctggatggagaaagccgagtcgggggcttgtaccactaacatgcattggaaatctagaacaatttaaagtctaagcttgttgcacaaattagcagaaagttgaagaagataaaatacatggccctgaaaacagagcgaacattaacaaacagaagccacacagaccaatgggaaagatagggcttattccactaataatgttgagaagttgtctaaacatttggaggaaaataaatgagatcttctttcacactgtacaccaaaataaatttcaaatggtcttaagagttaaatataagaaagaaacaaaataattaaaacttaggtgaatattaagctaatctcagaaagggcaaggtttttgtaagcctaaaagaaatggaaaaaataaaaggaaatgtttgacagatttaactacataataagttaagcttctctgtttctagaagaatggtgacatgtaacacagtttgcagcaactatgacaaaaggcttttatcatttatatctcaacaactcttctaacacagtaagaaaacttgttactaccttctagaaaacttgaataaggagttaagtcaggcagaaataaatacaaatgggcaaataaccatggaaaaaaaatttaacctcaaaaataagaaagtcaaaattacagtgttattctttacttttctcaccacttcttgatatggttttggtaggattgtggtaaacttttagaggagtaatttggcaatgtatgccaagaatcttgaataatttccatcctttaagctacttccaagaatgtattcttattcttctttgcatcagaaaatctgtggcgttcttaaacacacagggtatgatcagacttgcacagcataaatagaacaagaaaaaaagtatcagaaatttcaatgaatatttatgcatgaagatgatcagttgctatgttatttgtaaaggtgaaaaatgataaactttgtagatgcccccaaacagggaattgattaaataaattctgattagccataaaatgagatgttagacatttaaaatgttttcaaagcatactttgttataaaggcaggttctaaaactttattcctagtgtgatgtgaattctataaaaataaatatttcaatgtagatagatgtggaagatactggccataaacatgctaatgtgccaatgttggttctcccatgcagaagtatagttgttttagttttcttctttatatttttatgtctttaaatttcttgtatgatgggtgcacccgttactcctataataagaaaaaaattttcttaaatatcttcctacgttgtttatgcagaatcgtttcagtctctcataacctgggaaatatttctctcacaactaggtttcattttcttttgaaacatcagaattatagaactttaatgtaaaattttatgtcccactaattgtaaaagggaaagtaatgaaatatttatgatctttttccaaggactaaacattgttgtttctcatcttataccacagtcctccgaattctcttatgtaagttttgttccagtagaattttggttgatgagttgccaacctgtgttttctggtacgtgaatgggacagaaattcactcttatcaccaagcagccagcctcaccagcaaaatagaatattcactaaataggttccaaataagaaaatggttaatgtccctcagtccaggtttgtgtacagggccatatgaagctgtgaggcgatgtctgatcaggtgtatttttagtgtatctcattattcttgcctttgtctctggtaataaggaaacaaatatcacaaaatttaggggtcattatttctaaacatgaaagagatcacatcagaaattctgcaacattcataaacacagacggtgtcagcagacttgatacagcataaatagaacaaatgcagtgaactagacagcacccagacccagtttgtacacagaatctcagtctataattacccagtcaaaaattgttcatcgtggttgatgacacctgtgcattttatttcctgaaatctagagaagttccacgtgatcactatttaaccaagagcaaaagtccctttctgacccatttttcctgtaagtggagatacatcctgtgctcttttgtctttgtgggtacagagattctttcttcaaagcatttaacattttcaaaaaagtgtgccactccttttggcctggctttcttcgcccgtgaaaaggcctgggtggtttttccttgtccaagagtccctccaaatggacgctttatgtactgcaaccaagagctgagaagtttccaagctttcctgtctgtgttagcattccggtcattcagcaggaatccaatgagcgcagattttatcttgtctgtcctgtgttgccctgggggagtgatccctggggatgcgagggggtgtggcccttgccctcaaggtgctgtcagtctgtagacatggaacacctttgggctgggctaggctggcaggagagtggaagggcagaggaaatgggtcttgtgcaaggctaagggctgacagcactgagatggatggaggagtgtccccagcgatggggcagtgtggacccagaagcacagagcaaggtgggcacagagatacacgtgttcagcagttactcagttcacgcatggtgctgtgctgggcagtaggggttcaaaataactaaaagagactaaccttgttggtgtggagtggttcttttgggttatataaatactaaatgtgataggttgcatgcagttaaatatttagcatatagaaccaacccatcagaaccaatgccagctcctaagtcataccagcatctgctaggggaatgtgggccagaagacggagcgtcactgacatttagatagaggtgttcaagtaaatggtaggaaacagattagaggcctgttttccatgttgggagcctaaaagatacagtaaccaagtgccactcaagctgtggtagagaatatctcagttctaacttgttaatgggagaagaatatgattttgttgttgcttctggccaaatgattccagtgaatcagtctgatgagtggcagtgcctgggctgccacccacaaccaactctcacctgtcctgtcgactcttcattgttcatgcttgagaaatcagttacctccttatgccatggagggcctgactgcagtgcacgcccaccaatgggaagtcgtgcccacaccagtggcaagatatgccaccaccatcatggaccaaccacccaacgcctcctatccaaaggcagatcccagcaagcacttgctctctgttgccgggacttctcccagctccaaaactgccttagtctgatctattaatatatctttttaactgggtggctcataaacaacagaagtttacttctcacagttatggaggctggagactccaagttcagggcacaggaagactcagtggctagagagggcccatttgccgacagccccacatcctcacacggtggaagggcaaaccagctcccttgggcttctcttataagggcactgatcctctccatggaggctctgccctcctggcctaatcacctcccaaaggcccctcctcttaatgtcatcgccttgggggttaggatttcaaacacaaattgggggcaggaggcacaaacattcagaccacagcacagagctcttcccatccccagccgaagtaggaatgacccagaggaaggctgctgtccctttgcacacaggttctgaaagtgcgtggagagaggacgatccctcggtccctgcagaaccaggctcttgaagcatatagcagaggttctctacccagggcctaccctagaatgtcatcaaaactgcagtgttgtattaaaggggtgcatggcttagagagaatggagaatgcccagcccagaggcccagagtgttttaggatgtgcctgttacccaaagttaaaatctgtatgcgtcaggagtgacacttgggagctacacttcccaaccccctctcctgcggccaccggagcctgcctgggccccttctcctgaaacggccttctctgcccacataatagcccctagcgatgccagttctggttcctccgcggggtcccacgccagctgacccagcagtacctgtaacgtgtcccacccttgccagggtttgtgtgcctgcatggttttagaggttccaagtcagagcccctaaaccccttgccttattgctagacagcttgaccgcccccggaacatcacgtgggaagggcgctcggtaaatcctgttctggaggcaatctgtcactccaccagtttcccaatcaacatttgccgaggagttctggctcccggtgcagaactgacttgtggcgacgtgagggaactggcagcttcttagacccaagttctccctcgcagcatcgtcagaagaggcccaaagtagagacgcaaacaaaccctgagaacagcgtgttcttcccagtaacgtgaccgggaaaatgtgagccagaggaaacttgagagctccgtggtgcggctgagctggtggggtgagggttttttccctttttctatctggtccagcccatcggccacttgagatgctcctgaactgagtaaccaagctgttcggagggtactttctcagcaggacaagccctgagctctggaaaaacgcagctagaataacgaggaagcagaggggcctctcccacaccaggcttgccccgacaggtcagcttgcttgtggcccagcgctactgcgcacatgttcctttaagatccctatttccgaggcagccgtggcataattaaagaatggccctgtggatgtcctacggtgctcactgtttgcacttgcttctgggtggggctaaggtgtgggaccggccggggaagcctgaacaaggtggggttggccaattgcaacaggtcacagccagatcagataccctgaggaggaggctgtgagtcatgtttgtccagaagtgccaactgctgcaccagaaaagccgggagaaaagaagcaagcgtaaggtgcacatgagaggtgctggtttctgaaggttctgttaagacaggagaagatggatcatagttcctgtcaggagacacaccctctcccccgacccccagcccagaaccccttccttgctttatagcacaaggtgaaagttcagaggctcagctcaaagcagaaggaacctaagggaagtagagcgtccttttttgtgtcactttctcctcaaacaactcactgtgttggtggggtagtgtttgttctatgctgggggtcagcaaactacggcccaaggtccaaatctggcccacagcttatttttatttatttatttatttattgagactgagtctcgctctgtcgcccaggctggagcacaatggcacaatctcggctcactgaaacctctggctcctgggttgaagcaattctcctgcctcagacccctgagtagctgggactacaggcgcacgctgctacacccggctaattatttgtattttaatagagacgagttttcaccgtgttgcccaggctggtctcaagctcctgagctcaggcagtgcacccaccttggcctcccaaagtgctaagattacaggcgtgagccactgtgcctggcctattttttaaataaagttttattggaacacagctgcgttcgtttgttcacatatcgtccgtgtctgctttcgctatgcaatagacctgaatagtggcagtagagactttgtgacctgcaaagcctaaatgactggtgatctggctctttttagaaaaggtttgctatctcctattccacactaataggtgaacctgaatgcagaggtcaccttgtgaggaccacacagaggttaatgcccaggccccctgaggcaggactgagttgcactcctgactccatcccttactaaatgttcaaccttgagcaggtttgttaacatctgtctgccttggttttgtcatctggaaaacgggcatctgagtcattatttcacaggagtattgtgagtattaagtgagtgggtgtagtaaagcacgtggaaacctgtcagtaaaggcctctttgttaattcagatataactcacaggtcataatattcaccctttaaaaatgtacagtgtagtggttttcagtatattcacaagattgtgcaatatacaccaccactgtctaacccagaacattgtcatcacttcaagaagaaattcctcagtagtacttgtagtaggatgaataaccaccacccaaagacatcagatcttaatccctggaatctgtaaatgtgcccttaatttggaaaaagggtctttgcaatgtgataaagttaagcatcttgaggtggggaaattcttctggatgatctggatgggccctaaatgtgatcacatgtgtattcttagagaggcatagagagaaattacaggcacagagaagaaggtgatgtggccacaagccaagtcatgcctgccaccactggaaggtggaagaggcctggagtggattttcctctagagcctccagaaggaacatggccctgcagagcccctgattttggcctggtgatgtggatgttggactcttggcctccagaactgcaagagaatacatttctgttgtcttaactgggaagtttgcgtatactttgttccagcagccacaggaaactgaggatacctattgctaagattactattgatgtcatcctgctagcagaaggtaggccagagctagattaagtcctgtgatctgaactggggcagtgtgagctttagcatactccacttagtggtggagaagcctacttaagccaacaggcattcatctggcaggcaccccacaccttttccccacaccacttacttttttgtttcctcctgcatagggctaaacagtccttgttgactgaaaaaaaaaaaaaggacagtcccagccacccaacaggcttctcgtagtatgcacaccactgtcattgggaacatgactgtagggaaatgaacactgttttagatacatttatgctattttgtggagtgtcgtttttccttggtttcaatatttgttttgtggccttaaaaatctctacatcggtgcagatttacccagcccattttcacacccactgcaatcttcttttccctctatgctttccatgtgctgtttgtcctagaattggtaactgcagcagagagagagagaacccacaaagcaccatttcctctttggtggcatggttgctgggtactcactggctacgtggtcactgggtacatcatggtcttcattgattcagtccctggcctgttggttcttaggcagatgtcagcacattccagctgtagtgactggagcaccccagtgtactaagaggtttattggttttagaattgcatccctgaagctactacactcacaccttttttttttttttttttttctttgagacagagtcttgctctgtcacccaggctggagtgcagtggcgcaatctgggctcactgcaagctctgccgcccgggttcacgccattctcctgcctcagcctcccgagtagctgtgactacaggcgtccgccaccacacccggctaatttttttgtatttttagtggagatggggtttcaccgtgttagccaggatggtctcaatctcctgacctcgtgatccacccgccttggcctcccagagtgctgggattacaggttgagccaccgtgcccggcctacactcacacctttaaatcaggtgcagcacctttaaaccccttcactaagttcaaggcaccaaagcacagacatagctgtgcaggctttgcctgccttcccaccactcctctaggcacacccagggctcaatacagcactgcaagatgtgtgttcacttttccctctgtgctctttggccacccatctttctagtggaagagtttcctttcctcctcgttctcctgagcaacgttttcctccatcccctcctagctgaggctgacttcaccacctcttctctgggactttgtcttgctcaagtcatttcaatacatcagcaagcgaaagtggagttttgtacagtcagaagcttgcccgagctcagctactcattagctttgtgtggtggacaggttatttcacctctctctgcctgaaggccctatctgcaaatgggcttgataatagcatctttttacatgaaattaatttatggatctaaagtcctttgagagaacattctggatatctaataattatcaaaataatgaattctctgggttcgaagtcattttttattcctcaaagacaaggctcatgggttgtggaagcgtccttcactccgtggcctggtgttgaatgacatgaagttcttttgaccacagacactaaatctcgcctgtttccagcacttacctgcccttccaccaacatttttgcattcacatttcttttgctgtgggtaacttcaaacaaagaagagtttgtttgtttgttttttctgcagtgtcagagaacatttttgctcatgcctggtgtggagtaggattcgagaattttgtttactctcgcttttgctgtcaggcaggggtggaggtgggaggtgtcacggggtcagcacagactgaacaatcctgacttttgcagtaattctgttttgagcctttgtccttgtttttggcttttaagtagaagccaggagcaggggtgctcttagagggggggagaaaaagtaataaaaacagagaattatttcctaaagcaaaacagatcatttggagggccatgttgtccttaaatatggagacacttgacttttatgcattactaaacagtgtctctgtatagacatgaaccctttgatgggcagagtcactgtgggtcagtgctgacaagtctggtcctcaggcaacagggatacagctgtgtcctcaacaaagcttttggtgtatgtgcccgtggatgaatccttcagaacctctgcatgaccttactttgacccattgcccagctagagcaccctcagagtgaaattaaaaatccacattgggggtgggggaggtgggaaaggggcacacgctgggtaggttcagcagtgttgccaccgatctagcttttatgcaaggcagtgagtcacaggtgtttatcattccaccccaccatttatgctacatatattctctggattaagaaaccacctggagggactgggtgcagtggctcaggcctgtaatccgagcactttgggaggccaaggtgggtggatcacttgaggtcgggggtttgagaccagcctggccaacgtggtgaaaccccgtctctactaaaaatactaaaattagccaggtgtgatggtgggtgcttgtagttccagctactcaggaggctgacgcaggagactcacttgaacccgggaggcggaagttgcagtgagccaagattgcgccactgcactccagcctgggtgacagagggagactccatctcaaaaaacagaaggaaagcatctggaccgttctctgaacggattgcattgatctgttggatcagtggatccaatggatcaaggattgcattgagttatttttttttaattgcaaattactttggaacacctagttgctgactgtttcactgtagcctaatggggtctgttaccctgaggaaacagccctgcttctggggtcagagagaactgaatgaaagtgggagtagtggtggtgacggcgaagatgataaagatagcaaatgcttctttaacactaccattagtaataatagcaagtatataagacttactttgtcctgggttctcttctaatgctttgcgtatatcaattcacttagttccacagcaaccctatgggttcggcactgttattttccctgttttacagatgaataaactgcgaagttgggtaatttatccaaagccatacagctaataagtggcagggcagagatttggccctagctgcccacgctcttggtccctaagtgatgctgcccctgagaagtcacccaccacctgcagcacccattcacgtgagatggcctgactttcccctgtgcaccatcagatgtgtatccctcactcgggtgcctgcaagcctttgtgagcgcaccttgcttctctcagggaaagcatagcggtcactcccgcctggcttcctgtctgggtccacatctccacttttcatcaagcaggctcttggcaaaatcactggcttcattgcctagcctgcactgtgccatctactgtggtgcacctgtggcttagattctccaatccggctagggcggcccagtcctgcgagctgaggagcagcccatctgcctgtatccccactccattcctgaacatttacttacaactctaaaactctcatgtcctgggttcccgagccacctgcatcggggatcactgggtaggtggttctccatcttcatcatcttatttgaatgggctttatccagaaatgacaggttacatgatcaggaaattatataaccttctaacccaggctggtttttctcagtgccgggcttgacagctgataatttcagagcagccatctgaagccaaaaaaatgagaatataattagtattctgtatttctattaaagttctggaattacagaacagactttctattctgaaatggccagtgccgtggcacagatgtatttcctcagcagatgtctcctcctcataaaggctgcagaactgctaatgagctgcaatagaaaagcattcttcccgcgttccctgccagggccttgggcccatttgggcagacctcggggagcagtcactgcttctgcagctgaaggagcaagggaagtgtgttgtttctatactgttgtgtttagagactacctgtcttttgaaagttgagttggcatgatagatcttttaaaaaaaaactcattttcaatagtgtgtgtatctaagtagtgtgattttgttgttgttgttgttgttgtttccttatcttaattctgtgggtcaaaacaatttggttcttgcagaaagtgaaagacaagaaatgagccgtgggacctgtgctgggtctgttcttcttggacccagtattgctcttaggctgtggaacttgctcttgcttagtaactcggaattggcattccctccaactgtgcttcccaaatgtgggatgggaccactgatgggtgtgacttttggttgcacttgaggtgatttctgaaggtactgtacggatgttaaaaagcattaaattacgtgatgagttagttattctcaattttctttcaatctcagttgaagcagcaaagacttctggggctggaatatccttaacacactagcgcttgttaatttcccctttgtagctaagagacagaagatctcaggcaactggatccagctagaaatgaataacatctattttcattgtgtttacttttatggttaccttccatttatggcaaacaatcttggttttctgtttcctatagtgatgtgtttcctttttaaatgatggatattaaaaagcgagccaatttaaagaaaaatgtgaataatagttgaagtcttcaaatgatgtcagtgtgctaggccagggagcacacttagagagcaaatgctgggtgcagtgaacagtgcctggacctggcttcacctgagactcacctggggagcttaaagatcctggtgcctgggtgtcaacccggaccaagtagatctgactctctgaaggtggggcccagggatcagtgtttgactaaaacatcccaggtgtttccagggtgtagctgaggttgagaatgtctgcccacctatcctggggcagcgtcctcaccctctgactccatatctttttttgggggggtcggggggatagagtctcactgtgtcacccaggctggagtgcagtggcatgatctcagctcactgcagcctccgcctcctgggttcaagcgattctcgtgcctcagtctcctgagtatctgggattacaggtgcccaccagcacgcccggcttctttttgtatttttagtagaaatggggtttcaccatgttggccagactggtctcaaactcccaacatcatgtgatccacctgcctcagcctcccaaagtgttgggatttgactccacatcttgatcacatctttcccttgtttctctcttctgtctctagcccttgttctcatccgcttccccacttcaattttcctcttattttctctttcctagcttccccagcttcccctcttccatcttccttacaactattcctatgagtaatgccccctagcattgcctcttagcctgacattcttgaaaccatacagttgaaaccctgttagaacattaccacactgtactgttttccccggcatttgcttaccactccgtaagctgttggtgcagtttctgcacatctaagattgttctccaccagtaacttgtattaagagcaattatgatcatcactattgtgctctcaccgagtgcctatcactgctctaagcactttacatggatgagcctacataatccttgcttgaaggagatataattttccagatgaggaaacttaggaagataaaatagcttgtccacaaccacagagtggcagagccagaattcaaatgcaggcagccttgccccagatcctacactctgagcagatgggaccctaagttagttgctcgtaatcctgattcaggtgtcctggcatgccatgagtcacactcacacaggctgttctctgctgtgataagaaattgaaatttggacccactatttgcttcaatgacatttagaattgataactctttttattttcaacttaaatggtagtatctcagtaggacactcacagctttaaatcccatcaagattttaactcatcaccattccgaagagatcttacttaaatgattttttttgtgtgtgttgtctgtcaggaatataaattgaagatataaaagccagcacccgcaataattctgcaactggtaggaggcaacccaggacctcttggtgaccttaataagggtcttctttggcttatccaggatgtgaccttctgcagcctccagtattagacattccagggcattttctgccttttaaaaagcatctgattctcattctggtgtttaatcagagagagaccgttggcctctttccattcctcatgggagagctccatttttgtgctcacatttttcatctttggtgatactcagggttgatgttttagtgggctagactttctgcattggattaaaacctttcacatgagcttggtgaattctccagtgaccaagtcccctgggggcctccaaccctatagattccagcatgataagagtggaaaggagtccggaacatcatgcctggggtatagtgagcactcacaccatggatttattttttcattttccaagcccccaaccatgtaaggtattttataaacattattttatttgattctcccaacaattctataccactggaattatgtccgtcttcatttttctagatgaagagacagaggctcagagactaagcttcccagtgctcagggttacatggtgaaggaggcagagtttgcatgtacacctgctgagccacagggaccatgcctatgtgttttatttgtgtgctatctgctccctgagatgaatgaggttagatattttcttaggagaagaaatacttggaaggcacaaatggggtatgacaaactatgttcagcttctctgtggctagcagacctgagctagccccctccccctctgtatttgaatatagtcccatctgttacctacctatgtaaggcttccaggtaaggaggatgtaaggctgttggctggcaggaggcagaacacagtagatccacagactagtaaaggcaatgcctgtctctgacttccgatcttagggctgtacctccctcatttgtgtccaaagacccaacatctttagggttctccccctgcctcctccccatctaaccctgcccactgacaactccagtgccttcttctcaagttcttctgtaattcttaatttaataatcaaactatgctgataaactatgctaattgcctagatctgtggttctgcaacttttatggacatcagaatcacctggaggcttggtaaacacagatcattggacctcaccccagagttctgattcaggaggtgttgccagtgccgccggtccagggaccacactgtgggaaccactgaatcagggagcctggtcccagttatatgtgtgttgatggtgtctgaccagttgggtatctgataattcagccttactgggaaagatgccatgggaagataggaaggcatttgagataggagactcaggcttttgtcccttcatcatagcagtagataattatcttttacgttgacgtgcagtggctttagacagcttctcatggttgtgagcctctgccagctcttaaatctttgagcctgttttcctctgtggatgaaatggcctttccttctaattatttttgattcccatatcaggtttctcaagctaagattgcattggaagcacctggaggtcttgttaaagtgaggattctgagttattaagtctgaggtgggacccaaggttctgcatgtctaatgagctcccaggtgatatagatgctgccggtccatggaccagcaattctgagttacaactgtatacagcagtggtgcttgcccctgctgcccagtagaatcacccaaggagcttttaaaaacgaatacttgagccacattccttggagattctagtttaattctggggattagaatttttaactcccccattccccaacccccatgtgattccaatgtacagtcagagttggaagccattggcctttacccacaaaaagggataacaccttctgggagctcaggtgcgtgtgtggcaccatagaccaggttgggctggtcgcttccatgcagggagggtgcaccattactcctggggagctgcaaaggtcacctgggaatcttgttaaattacagattctgctttggcaggtttggggtgggacctgggtttctgcatttctaatagatatcttagtgttgctgatgctgccagtccaggctggtgctaagtcccaagacccacccacaagggcccacacgatgcccattatctctgccggtggtggcagcgggtagcttttctcatgtcgagtgttagaggcttttggcttccaccatctgtctccttaaacgccattctgacgtctcttttattcagcttggtattgacacaagacagcgggcaatataggtctgttctctttttgtaatattttcttccttctctcttcacagtacgagatgcaaaaaatctaatccctatggatccaaacgggctttcagatccttatgtgaagctgaaacttattcctgatcccaagaatgaaagcaagcaaaaaaccaaaaccatccgctccacactaaatccgcagtggaatgagtcctttacattgtaagtggtctctccttgatcaaatttcattcctatacaccatgcagttgcccacctcattatttgaggtaatgaagtaggttcattataaacgtctttaaacatgtcttcagtcctaagacctcctcaggctgccattagggaggtagctattagcacctgttcgatagatagtaatttgatttatcaagagttgcataattcaggcctcagattattattatctaatctggataaacaattctatttaaggaaatagaattaaggtaaatagaatttaagctaaaaatgtgtcaggtgtgtccacctcttgatggacttaggttcttttgggagttaggggagggcataaggcaagaatttaaataatttttagaccacagaatgagtgagtaacatagaaagtgttattgccactgaaatgggaagatcattcttgccttcaaagagagaagacttcctggaaaaggtgacatttaaagccagcctgggagggttgccaggatttcagaggtagagaaggggaagaaggaaggagggaataaataaatcaggaggactgagtgtagctgagggaaagcaagagttcccctttgtagagtagtatacaggaagcagtttttctgtggacaaccagaaaggtagctgtctgttctagagggaccagcaagctctgctctataaaggatcagatagtatatattttaggccttgtgggtcatatagcctctgttgcaccggtataactttctagtgccaaaggagccataggcaatatgtaaacagatagccatggctgggtcctaataaaactttatttataaaaatagacagtgggatagatttggcccatgggtcatagtttgttaactcctgtagcgctttgcttgccagcataaggggttggtattttactggaccaggaagacaaatatactatttctttatctcaggctcgagtcatatacatgtggtatctcccaagaaaccatgatcaagataacctagtgtttgcatgtgtgtgtgtcttgtagcaaattgaaaccttcagacaaagaccgacgactgtctgtagaaatctgggactgggatcgaacaacaaggaatgacttcatgggatccctttcctttggagtttcggagctgatgaagatgccggccagtggatggtatggaagccgcttaggttgagtatgtctcaaagcatcagaccatttagacagttaggtttcagtctctcaaatgtcagttgaggctggacatggtgcctcatgcttgtaatcccagcacttcaagaggccgaggcaggtggattgcttgagctctgaggtttgagaccagcctgggcaacatggagaaaccccacctctacagaaaatacaaaaattagccaggtgtggtggtgtacccctgtagtcccagctacccaggaggccgaggcatgaggatcacttgagcccaggaggctgaggctgcagtgagctttgattccgccaccgtcccccagcctgcacaacagagctaccctgtctcaaaaatataaaaatgtaaaaaaagtcaaatgtctactgatctggctgtagcctctccgtaggatgcgtttcacaaaaccgctcgactagaggctgcaggaaaggcttgttaaacttgcggtggtaactcttcttctcccgtccttgaaaggtacaagttgcttaaccaagaagaaggtgagtactacaacgtacccattccggaaggggacgaggaaggaaacatggaactcaggcagaaattcgaggtgaggataacaaaatgcccggaaacacctttcctttagaaagcccaacttcaggaacggccgagatgttgtggtcacatttttgaaaagcaaaaaaaaagtaatctcaatgttaatgatctttttctttatttaaaaacatgaatgttgttcgttccctttcctttgcaagctgttgactttttatgactcttaccacttagaaaatggaaactggaaatatcgcagaactgagagcatggttgatttctgcataagagatctgtttgcacatcactggggagagaagcaggctctgagggcaggattgttcttacaaaggaggacttgtgctcttctgaaaaggaggaagtcattttggcctttccttgggagctcatttgtgtgtaatcaggctatcatctgagactttttttttctacagaaagtacaaggttcctaattttgttctgaaagagcagcttaaacaaatatgcctttgtgtgtgatccctttttatttatgctccagatgtttagcaaaggccacctccttctcttcttcctcttggtatttgtgtttgcctctgtcccggattcactggtctttttacttctcctcctctgctccttactcctctttttcttctcctctctctcccttctcctcttcatttaccgacatctcagcttttagtaaacggttcttttctgtaagcaccttccttatgttttaaaggcacaacttctaatatttgtctgtttctctaatcacccttcattttggctgttcgagggactcctagagtagccttttcagtctgtgtaactggttaattccttcgtgaatctttctcttcttcagacttgttagaattccctggaatttccccgctctagagcagtacacgtgcacacgcacacatgtgtgtagatgctgaactgctactgaaatgttgacactaatgggatgctgatgctcctcttttccttcttctgttgttctccaagaaacatacagatctggggggtggggaagagtggtcttggggggataataaacctccttcatgccccccacaaaagaaacatataggtcttatccagagagaatgaatcccaaaggatgtaaaacatgcagttgttcaaattactttgttaaactgatgtttggttaaagttgatgtttgtggcaaatactaaatggcaggggctctttggttagatgtccttgggagcacagacgagtgaaatgattcacagataataaatggcaatgaacggcaggcctcgggattgaagcaggagggagtggtggagactggggtgagctggtaagcttcagctctgtctgcaggtggcagctacggctaccctgccccactcgatgtttctcacaggcgagtccaggccctctattgccggatcttccttcttccagagaagccagaaatccaggtttttatatgatacattctgatttatcttaatgttggcagagttctaatgttaaaacttagaaccaggccctgtgcagtggctcacttctgtaatcccagtactttgggaggatgaggcaggcagatcacttgaggtcaggagttcaagactggccaacatggcgaaacccaatctctactaaaaatacaaaaattagccgggtttggtggcatgtgcctgtactcccagctactccagaggctgagacacgagaatcacttatacctgggaggcggaagttgcagtgagccgagtttgtgccactgcactccagcctgggcaacagagcaagactctgtctcaaaaaaaaaaaaaaaaaaaaaaaaatttagagctgtccggatgtggtagctcacacctgtggtctcagcactttaagaggccaaggcaggcaggttgcttaagctcacaagtttgaaatcagcctgggcaacatggcgaaacccagcctctacaaaaaatagcagggtgtggtggcatgcacccataatcctagctacgagaatcacttgaacctgggcacgagaatcacttgaacctgggaggcagaggttacagtgagccaagatcacgccagtgcactccagcctgggcaacaaagtgagaccctgactcaagaaaacaaacaaaaaacttagaactctgtgtaggtcaaatatgcatctattgctttagacaccagtaggattcaaccagtaagaaccagcttgcagtctctgctcttcaaaaatagagaaaaaataattttaaaaaattatttgtatagttatatatattacaatatgtataaataaaaaggtgcatgtatctgtgtaactactatttgtctatctatcaatagagagaaaagaatgagattcttttcaaagatgctttataatatttagaggaattcaagtacaaagatgaaagtcagggtttggggcaggttcaaatgtctatgccaggcatagctccttttcaatttgtatttcttcccttgcttcattatctgtttccacccctaccctgcagctgaggatgcagacctggggtactggacaggaccaccttcttgagccccatccctgatgtcacaccacctctgtgacggatggatccttctagagagagtttcaggactgagtgccagcattcttcagctgtctcaggcaggggaggaacctgaggagccagaaagaaccttccttaccgaatgttatgccatggtgttgatcacgagcagtcactgggtcaggggctgttgacgcagaaagagtgcattcgagggaggaacagcacgggcgttccccacagggttcctcacagtaatgtctgagacttagctttgctgctggagaaatattgacccactctttgtgcttcattgtcgtggcttcctggtgagtaaacttcctgtttttctgggcaatgagttcagctttttataaaggtcagagttctaaacaaacaaacaaaatacaggccagaggacctgagcaaaacgaagcatttctcttgggaggctggtcagaggccgcagggctgttgctgcttactattcctcctcctgggagggctgtggacttggcaggagcgccagcccaaggctgtgagcatcctggggagaggtggcatcagcagagttgcatggggtggaggctctgctcttcagcctagtgaggtctgtgtttggagcatctacatgaactgcattctaacctttgctttaaatacctttcagcttatagttcctagattttactcaaattacattagctcatttgcttagagcattttaaaaaaacacaactgcaagagactgggcagaaagccactagaggatggcgtcaaaaagatgctgagaattttacgacagctgccatgcttcattttaaatacatattcagatctgattttaggcaggggttcaatcacgtaatggtgttttgttgaggtctataaatgtgagagttgcaagacttccccagtgccaagttactgggaagggatgcaccagggcagaaaggctggcatccacatttgagcagttctgggtagcagccaggctttgcaaacagggtgccatcagttggcatcaggtccaatttgaggcacctctttgagcccccaccccgtttcctccttttcggtctgtagcatgagtgcttcccagtgtctccaggctcccctctctgggccctttctcgccaactaactgccattctaacttgctttccatcacattagtcttttcttccctacccactctttcatagatactttgccaccctccagtaacagtttgattcagctgagtaagatttttttgttaagttcaatgatgaatctgtattggttgaaacacacacgagggttcgtcctgttgggaacaggcatcactcagtgggatcacacagtgtccagtctgtccttatccttccatgtccagccctgttttctaaaaagggttccctccatgcagttttcgaatccttctccaaaaatcaaaagtcattcagttggatgaaagggaaaccaaacgagcatttacaactctgccactgcattagtattcattcgataattaggtggaaagtttttgcaatttaaatggttggttctcaaatcttggcaaacagaatgatcagtgactggagctcttaggagccaaggaatattccagggtggctggagatgaccttcctcgctggtagagatcctgctagagcagttcatcctcctacaagacaaaacaaaccagaaccttgattgcgatactcatggacagtgtgtctgtgggcctttaatctgttccacgtttgtcatcaagtaaagtacacgtggtccctgattcacaaacataaataatgcatttttccatttgttaaaaaaagtaaggtgccagcagtgggctaagcagacagttcctgctttctttggagcttacgttctgtatctatgggccctgctgcaaaaatatttgggaacaaagcagggagcttatcatatcccctgtgctggccagtgattcccctgaatctccaggcactattgaggacaactgagattcctgtttttccctctcactgcttggtctctgctccctgtgatgaggctcacggccagagttgggaaaaggtccaccttgcgttagaggcagtgcagaggatgggttagctctgctcagcaaactttttctgtacctagtcagataataaatattttaggctttatgggccatgcggtgtctggtataacattcaagtctgccgttgcagctcaaaagcagccacaaatacataaacaaatgagtgttggtgtattccaataacacgttacttacaaaaacaggtggcagaccagaattggcccaagggccagtttgccaacttctggtttagcccgtaggctctagaatcaaatcctagtttagtcacttatttactatgtgacctttctgtgcattggcatgcttaactataaatggaaaaaataggtcaggataactagttctgtttttctattagttataaatagaactaatatcctgatacgataggatattagttgttgtcagggaagtaaatataataccacagtgagaagtcagcttgcactgatccttctcgattcaatggtttgatgttgggtcccgattacaaactgaaaagtaggcacatataaaagatgatttggccaggcgcggtggctcacgcctgtaatcctagcactttgggaggccagggtgctggatcacgaggtcaagagttcaagacaagcctggccaagatggtgaaaccctgtctctaccaaaaatacaaaaaattagccgggcatagtggcgggcgcctgtaatcccagctactcgggagactgaggcagagaattgccggaacccaggaggtggaggttgcagtgagctgagatcgtgccactgcactccagcttgggcgacagagcgagactctgtctcaaaaaaaaaaaaaaaaaaaaaaaaaaaggatttgatgtaaaccacacgaagaatcaacacaagtataatcataatgattgttgcagctaataattcattagagaagtgattatgttaacaacagaaacgtcacagttgattgactactgattgcattcacatgaaggtccagtacttttgttggtgtaatattgccctctgatcttttacaaaatctgggatctgaatcattcacatcttgagctgtacccaggaagttacatgctacattcacatttccaatggttaaaaaaaaaaaaaaaaaaaaaaaaggtatcttctagccacatctttccctcttttaagacagttcccgaagttcttattgtcatttgcatttcatttccatggcttttagtaagcttagtatttttgtttcttgtttatccgtcagttgattctttccctgagcctacttgggctacatctaccttcagagccttggagttgtcctagaatcaagaaaatgggctgagaggtaggggaaggggaaaggtgaggggaagggagttctgggaccagtttctaggcctgcctgggatccagccatttcctatccccagagttacattccttcctttcctcagcgccccttcctcttgtgcagagcctttctcctaagcttggcccctcttccctagggctgtttactctgtccaagaccttcttccccaatcctgcaacctcaagagaaatcaagccagaagggcaaataaccccagccatggacctggctccctggggctgagggcacttcaggacaagtggtgaagaccacgtctcccttctccaagcttcagatttcacaaaacgaaacatacgtttgctcattttgctccagtatcacaatgactacttttaatttgcattttgatggcttttagctgggaatggactttcaacgaactcatttctacctgtagggttgcttatctactccatgtgctgttaacagttaatggagattctaatattaaaaagtcaagcagctttccttaaatgagcctacaccattcaattttgctcaattgtccaggctttttattgtttttgtcatttattatttcgttcatcatttaaaaaacagagcaaattaagaagctaaaagcgccttggccttttcctcctcttactgtaaccgtaacttttgctgcacaccattgctctattccagagcaagttaaacatctaatatttaaaaagccaaaaagaaacttgtagcagaacaaagatagctaagaggcagcacacctggggctttgtctgcgatgggatatttctgttgtcagaatgtaatgaaaaatgatgtcccattagaaagctgatggataatatatcacatattactcatttgagtatcaggacccaagaaaacaagatgaatttatttaaattgcaatgtcccttgaagcttgtatgagctctctaaagggaaatacttttaaagttcttataaagagagaaatttatagccaagtgtgaaaaatgaagtgcagttttgaggaccagttcccatcctgtcccttcctggggagcaagaggtgtgatgttgatggagcagtgatgaaagcagggggaatcatggcaaacacccgctgtgtgatgattagatgctaggcagtttccgtgctgggcatcgtatattcctttcatttgagaagtggtattgcatagtggttagaagcctcagtgttggacccagacttctaggttcaaatcctgccccttttatatcccagttgtatgacctgggacagattactcaatgtttgagcatggtatttttctagaaggaatatgcaatttaaaatagccatagtttcatatccctgctctaccacttcccagctgatgatcttggataagttccttaaactctctgacctttgttttccttgtttacgaagtggagatgataatagagactgccgcataggactgctgggaggattcactcagttcacttacgtaagttgcttagactagtacctggcatagagtaagtgcccaataaatgtttgctaattatatgaaatagacatgatttgcccaagtttggttttgatttatatttatgaaaagttatttatctgtgcaaatgaggtgctaccaagaggtaagagcattcttagaactctgttttgagcattagaaattgttatcaaggacttatttctgagaacagaccagtggattggttgttccaacatttatggtttcttagaacctgaagctaaacccgaattctgctatcttgatgacattttcagcagacaggcttcccagttcatctctgttttcacccactttctcctgacacctggcacccaggaggctggggaaagttgtttgaacttgagtgcatacgtgatcgagagctttggcatctgagagacctgccttttgtccctgctcccaggttgctaatgccaccttggcctgactccgccgtaagcatctgtgctctgccttagaacctcaagtcaaccccctcataattaatctgattttccccagtcatagaccatcgtcatcacacctcgcctgtctcctcagagagtcgagaaagccttggaaattcttcgacccattagacaagtcagcccagaggaacccagtctgtctacctcttgtgatttgaagcacattgtcagctaaataatcacataatcataaattctaaaaagtaaatagctacattttgccttatcttgaaaatcctctagagccacactatcccaatagaatctaaagctagatgtcagcacagtggtggaataggagctttcaccatcattcccctgtagacgcatcaatgttgacaactacctatggacaagagtgtctttgtaggagtctaggaggccagcagagaagtttcagaacactgttggaggaaaaacatccacaaataaacacattgaagagggtaggaagaactagttttactttatctgtattacccctccctcaaagcagcactgctcagagccaagagagactctctcacctgtaattccttctaagggggaaagcaagagcatagtaagtaagcacccagctcccccagccatccacaacactgcccaagagccccacttctttctcacctcacccagattgctgagataatcagcatggctgagagattgggagaggctgagagcaggaaagagaagctgctggccctctgaagtgttctacagactccatcaggaagcccatccacgagctgcttgagacacctcatctactgttcccaaactctacaccccccacccccagactgagtccctaaatgtgcccccatggacagtgaatgcaagcgtattatgtagacagccagctcaactctgtgggattgggagaaggtacacaaacttgagtatttcaggacaccatcctagggaaaacaaacaggaggctcttagcacctaacctagctttgcaggattgaaagaaggcatgcaaagtcaagaattagccctcaagagggaaaaagaaatgtagagcaggtgcatccatagaaaaggattaagaaagtctcattatccatagacaggctgactggtgaaggcatttctctcctgatgccagtcaataaggattggaggaggagatgactgcctccttcttcaaatgtgaagacagcatttgaagcaacaagacttcaaaggacagcacttcaaggaacatgaaaagttaaggagccatgacatcacaaaggaacacaatattccagaaagcaactactaaaaaatggagatctaaaaatgacctgacaatttaattgttttaaggaagctcagagagctagctacaagaggatacagacaacaaaatcagaaaaacaagagctcaataaaaagattataaatcatttttaaaaagaaccaaacagaaattttggaggtgaagaatacagtgaatgaaatggaaaattcaatagagagtgacaacagcagatttgatcaagtagaagaaagaatccatgaacttaaagacagctcatttataattaccaagtcagaagaaaacagaaacaaatgaaaaggaatgaagaaagcctatgggatttatgggacaacattaaaagggctaacatttgcattgtggaaattctagaagggaaaaagagaaaggggaagaaagcttatataaagaaatgatggcccaggtgtggtggttcatgcttctaatcccagcactttggggagactgaggcaggtggatcacttgaggccaggaattcgagaccagcctggccaacgtagcaaaaccctgtgtctactaaaaatacaaaaaaaaaaaaaaaaataggtgtagtggtgcatgcctgtagtgccagtactcgggaggctgaggcacaggaatcacttgaacctgggaggcagagattgcagtgagctgagattttgccactgcactccagcctgggtgacagagcgagactgtcttaaaaaaaagaaaaaaaaaatgtctgcaaacttcccaagtttggagaaagatatggacagtagaaaaggtaagcaagccaggcacagtagcatgtgcctgtagtcccagctacttagagggctgaggcaggaggatggcttgagctcaggaatttgaggctgtggagcagcttcgattgtgcgtgtgaatagccagtgcactgcagcctgggcaacataactagactgtctctcaaaaaaaaaaaaaaaaaaaagattaacaaaactaagagttgatttttttgaaaacataaacaaaattggtaaacctttagctagactaagaaaaaagagagaagaccaatgaataaaatcagaaatgaaggagacattgcaactgatactacagaaatacataagatcataggagactactctgaactgttacacaccaacaaattggataacccagaagatatgaataaatttctagaaacatacaacctaccaagactgaatcataaagaaatagaaaatctgagtaggccaataatgagtaaggaggtggaaccagttatcaaagatctcccaggaaagaaaagcccaatgcctactggcttcactggtgaatgctaccaaacactttttaagagacaaggtctcgctctgttgcccaggctagagtgctgtagcacaatcatagctcactgcagctcaaactcctgggctcaagcaatcctcctgcctcagcctcctgaataggtgggactacaggcatgcaccaccacacccagctaatttgtagggatgaggtcttgatgtgttgcccaggctggtctcaaactcctggcctcaactgaattcctagcctcaaggcttgtcctccctttgctgggccactgtgcccagactctaccaaacatttaaataagaattaataccaatccttctcaaactcttccaaaacactgaaagggaaagaacatgcctgagttcattttatggggccagcatggccctgataccaaatccaggcaaggacatgacaagaaaataaaattaaaggccaatatatccaatgaacagagatgcaaaaattctcaacaaaatactatcaaaccaaattcaccatcacatttaaaggatgatatgctgtgatcaggtgggatttattcctgtgatacaaggatggtttaacataaaccaatcaatgtgatacacaacattaacagaacgaaggataaaaattgtatgattattttaatagatgcagaaaaaggatttgacaaaatttaatgccctttcaaaataaaaactctcaacaaattaggtataaaggaatgtacctcaacacagtaatagccatttatgacaagcccacagctaacatcctgctctatggtaaaaagctataagttctttctttcagatcatgaacaaaatgaggatgcccattctctccacttctattcaacatagtcctggaagttctaccaatgcacctaggcaagaaaaagaaaaggcatccaaatcagaaaggaagaagtaaaatagtctctgcagatgacatgatcatatatatatatagaagaccttaaagacaccaccaaagaacttgttagaactaatgaacaaattcagaaagttgcaggatacaaaatcaaaatacaaaaatcagttgtgtttctctatgctaacaatgaactattcaaaacaatataagaaaacaattgtgtttacagtagcatcaaaaagaacgaaatacttaagaataaatttaaccgaggaggtgaaatatctgtacactgaaaaatagaaaacactgatgaaagaaataataatacctaaataaatgggaagatatcgcctgttcctggattggaagaattaatattgtcaaaatgtttgtactacccaaagtgatctacagattatacgtaatccttatcaaaatgccaattattagtataatttgtttccatagaggaaaaaataatcccagaattcgtatgaagccacaaaagaccctgaatagctaaagtaatatggagcaagaaggacggaggtatcacactttctgatccaaattatattacacatctataataatcaacacagtatggtactggcatacaaactgacatacaaaccagtagaacagaatagaaaacccagaaataaaccccacacatacgtggtcaactatctttgacaaaggcatcaaggatacagaataaagcaaggatagtctcttgaataaaaggtgttgggaaaactggatatccacataccaaaaaatgaaattggatagatgcatttcgtagcatatacaaatgtcaactcaaaatggactgaagacttaaatatgtaaaacctgaaaccatagaactagaagaaaacatacttggggggaaagcttcatgacattggtcttgacaatggttttttggatatgacaccaaaagcactggcaacaaaagcaaaaataaagaagtggtactacatcaaactaaaaagtttctgcacagcaaaggaaacaaagcaacaaaattaaaaggcaacctgtggaataggagaaaatatttgcaaactgtatatccaataagggtttaatatccaaaatgcataaggaactcatataatacaactcaaaggcaaaaataaaaaagaaaacccacagattttaaaatgggcaaaagacctgaatagacatttttcaaaataagacatacaaatggccaacaggtaaaggaaaaggtgcttaatgttgcttatcagggaaatttaagtcaaaattgtcaaaattataatgaggtatccctgcagacctgttagaatggcagttatcaaaaagtcaaaagataagtgttattgaggatgtggagaaaatgatatacactgttggtgggaatgtaaattggcatatcagttatggagagacagtatggatgtctcttaaatacttgaaaataaagctaccatacgatccagcagtcctgattctgggtatatatccaaaggaaataaaaatcactgtcccagaagagatatctgtactctcaagttccttgcagcattattcacaatagccaagatatggaaacagtgtgttcattaatagatgaatgcataaagaaaatgtctgtcacatacatatctcatttatgtgtgtgcatattcatatatatatatatacacacacacatatatacatgtaaaggctcaattgtgtatacacatatatgtatatgtgtgtatgtgtgtgtatatgtatatataattgagtctttaaaaagaagaaacatttgtaacgcatggatgaacctggaggacattatcatattatcatctaagtgaaataaaccagacacagaaacacaaatagtgcatgttttcacttatatgtggaatcttaagaaagtcaaactcacagaaacagaatagaagtgtggttaccatgggttgagcagggtgttggaggaatgaggagatgttggttaaatacaaactttcagctttaagatgagtaagttctggagagctaatgtacagcatggtgaccaataataataatgtgtttttatactagaaatttgctgagtagatcttaaagattctcaccacacacacacaatggtaactgtaaagtgacagatatgttaattagtttgattgtagtaatcatttcacagtggatatgtacacaaaacatcacattgtataccttaaacaatgactaataccattttgttagtcatgcctctatacagggatgccttctgaaaatgtatcactaagagatttcatcatgcaaacatcatagagtgtatttacacaagcatagatggtataacctattccacacttaggctatagggtgtaacctattgcttctatgctataaacctgtacagatgctgactgctgtaggcaactgtaacacaatgctaagtatttgtgtatctaaacatagaaaaggtacagtaaaaatacaatataaaagaaaaaaagtggtacactagtatagggcacttaccctgaatggaggttgcaggactggaagttactctgggtaagtgagtgagtggtgagggaatgtgccagaacaatactgtaagccaccacaacacttaggctacactcaatttatttttaaaatcttctttcttcagtaataaccttagcctacagtaactattttactttataaacttttaaaaaagttttgactcataataacacttaaataacacttaaaacacaaatacattgtatagctgtacaaaaatatttttatctccttattctatgtctatttaaaaatttaaaattttttttctgttaaaaaattttttttttgaccctacacaggtcaggatcatccatatggctgtccctcacctctgcatcttgtcccactggaaggtcttcaggggcagtaatacacatggagctgtcatcacccctgataacaatgccttctggaatacctcctgaaggctctgcctaaggctgttctacagttaacttttgttttaataagtagaaaaaaataagacctgatgtggtggctcatgcctataatcccagcaagtttgccaggccaaggcgggtggatcacctgaggttaggagttcaagaccagctgggccaacatagtgaaaccgcatctctactaaaaatacaaaaattagccaggcatggtggtgagagcttgtaatcccagctacttgggaggctgaggcagtagaatcacttgaacccaggaggtggaggttgcagtgagctgagatcgtgccattgcattccagcctgggtgacagaccgagactccatctcaagaaaaaaaaaaatagaaaaaatatactcttaagataacaataaaaatatagtatagtgaatacataaaccagttatatagtcatttattatcgactgtgatgtactatacataattgtgctgtatttttgtgtgactggcagtacagtacctttgtttacaccagcatcaccacaaacatgtaatgtgttgtgcagcaatgttagtgtctgtgatgtagacatcactgggtaataggaaattttcatctccatgataatcttatgggaccaccatcatttatgcagtccatcgttgaccaaaatgtcattgtgtagtgcctgactataaaacctttttctacatttataatctcagcaaagttaaaaaaaaaaaaaaaacaggaataggttaagttcagaactgggcttgaatttaaaatccccactattaacaccaccactattgatttggtttcacttaaacatcatcttctgtcccataaattagtgctgttatttggaaatgtgtctataacacttcgctcaattttaatttgtatctttattatagctttagagttgttagtgtactagtacatatattaaggcttatagttatctgtacatacatattctactaactctataataaaatttgttaacacatggagcaaaaaaataatctcaagctagcttaacaatggcttctgtccaaactagacccccagtaatattgggatgactgaagtctcatgcagagaaatatgtgtgtcttcacagttcttatatttgtgaccattcagaactatatgaagatataagccaaaagaaaattggtgatcttgaatgagctgttttgtgaggattataagtccagatactacaggaagtatcaccctggattcagattgcctgaaaaatcaaatgtgtatctgtttttacttattcaagagaaatattttgagattatccttcttactaattaacaaattaatatgatccaattaaactataattaaggtacttaaatcaacaaagatgagactctgttgctaggttatatgtggaaagagcaagcaagcatttttctcttttatcagaattagattttcccaaagcctccactgtctttgaagactttatctagttcagaatgctctcttccagttgggggaaaaataaaaccacaaaacacagttcactagagaccctcagataaattgtagctatttgttgatctgatcagccctgccacggttactatggaaaccagagtactttcagatgaccttttagacacaaaacaaaaaaatctatgtgccccaatatgctctctgcttttttgtccctaaatagcttacttaattacttccttaactgtgtgatgttaagggggaaaaaaatctataaaatgcacagcagttgaaagagatattttaaggcttatccttcagctttgtcttagaagcaaagtcttaaactgatataggagacaggttagtagtagaaatcattttcaaacactcattagatcactgccaacagaggttaacctggcattcagctgagcagacccaaaggaagcaagacagcctctgaaagcaactgtacagaatttctcatgagtctgtaagggagggtgcatgcatttatattagagtgctggcagcatgctttcagtttaatttgtctcgaggaaataattttgttgggaaaccaaaaaagattgtgcattctagttgtctgtctaatgaattcctgaaacagcataaaagccctgtgtcttgtagttacagggatggccttgtgggtggatgttgctggttgaagaaatattagttaatatcacacaagcctgttattaaatgttagaggcagctttgcaaatgtccccaggccctggtacccacaggggatgagcaggtaccaagggtgccacccttcatttacaggaactggaaggagggaagacagagccgatgtccactggcactagcatgaacatggcagctaaacattggcacaagtcttcatggctctatctcaagcacctaagaggaaattaaagccccctaaaataaaattaagggacctagaataagggtgacaccaaacataatgctatttgttgttttccccaaaaaacatgccctacagagaattaagattgcctgtccctggagcggtaaatcgcaagggttctgacctccctgggtatcctgaaagaggaagtggcgagcagcttgagctctagatcttgcacctccaagtatgggagctgattaataatgcagaggttcagagcccagcccagcctctgacccagtcagaatattattttaacaaggtccccaggtgattcctgagcccattaaagtttgagaaatgctggtcaagaagatgaaacctgttgactgatgagtaaacaaattcagtctcctgtggtcgtaaagacagcaaggatagacttcatcacccccagtacccatattaaatagcgaagggatcagtgaactgtgacccacacccaaccacctgcttttgtatatacagtctatgagctaagaatggtttcaaggctgggtgcggtggctcacgcctataatcccagcactttgggaggccgaggcaggcagatcgcaaggtcaggagatcgagaccatcctggctaacacggtgaaaccccgtctctactaaaaatacaaaaaaaaaaaaaattagccaggcatgatggcaggcacctgtagtcccagctggaggctgaggcaggagaatggcatgaacccgggaggcggagcttgcagtgagccgagatcacgccactgcactccagcctgggcgacagagtaaggctctgtctcaaaaaaaaaaaaaagagtggtttcaggatttttaagtggttgaaaaaaagaaggatatttgcgagacatgaaaatttggtgaaatccaaaatctggtgcctataaatagatttttattaacacaactacattcattcattcgtgtgttgtccacagctgttcctttgctaccacggcagagttgagtccctgcaaaagagactgcatgggcctcaaagcctaaatgtatgccctctggtcctttacataaaaagtttgtgacctctgggttaatggaataatagggtattcaaactgggagagatgtttaagattgtgtttgttgatggggaaacaaaagcaaaagggagtgtgttcaaagcttgttagtgcaggacccagacctcctgtgtgagttgatgcttctgtctcataccctgtcccttcccacacacccttccctatgacacccccttttctgactcctctccattcatccaccatgctcattaatgcatctcagcccatgcttgtgctccttggaaagaccctcccttctcctccacttccgtcagtcctaggcttttcaaatcctacaagtccctttatgtggttctctggcctcttaaaattgccttgacttatgcagtctaaagactactcacttgccagacacacctgtaagatgtgtcaccttcctgattccagagtaagaacctcaggccctcctctgaatactttgaagtctaaacatcaggcccatgaggagtccacccttcacctgcacttttttgacagcccagaggaaggtgtctgagccaacatctttatgaggctggttggaggccttcaggggagaggccattttagagccacgagaacctccctttcttcctctagcagttgtgtaaaactcacgtgtgtgacaaatctggttgctcttgaagatggaccagtttctttcccatacattttatggttccagaaatcagtaattctggacatttctaactggtggatgctgcatctactctgtgtcaagcactgtccctggggctagagacagaaccttgctcttgggaacattgtggagtagtactaagggatatgagaccttgtaccttatctccactttctggaaacgacccctgaccctcatagtggagggaagcttacaccctgtctcctaaacagtagctagcctagatcagcgggagtctgacccaggccacaagtcagttctttgtccacgtagcagtatctccagctcttgagatgctgagtaagcctcactgctgaaaagattatggctcgcctgatgtaacatggcttttataggcagctagaaccacagaggcctcagagaattcaaaatcacagctccctacatggggtccaggaacgtgtggccaaggtgctcatggtgttgtattttggttttagtttgttttcagggatgaggcctctttgcccattaggactgtcgccatgatgtacacatgatggtggcacttcccagttcatcaggccgaccaagtggggccatagatgtccttgttcaggaattcagggaactcggtggctgtcgtgtcttcagcacttaattgaaaacgaagtggttaacatttggcactagtgcagcttcctgccatttgccactttcaccttgagcagaggtgttttgcttcctcatctcccttcccagcatccaggtgtgtggtccgggaaggattccctgggacctcttgcagatgtgtagagcaagaggtgctgtgcgtatctgggctgggtcacttcagcctttcctttgatttttttttcccagagaagatttgggatggtttgtcatgtccaagtgtgaaacagccttagagttctttctaggtccatttgagtctaagaataactacccagtggctgccggaaggctgtgaagccacatagcaattgtatcaaggtgtctctgctaaatgttttttgtctccctgtagaaagaagcaggtgacctattgcagatggcagttggagataggaacctcctaaagtcatgccatatacttctcagggcatcccagctactcaatacagagtaccctatgcctatagatatccaagcaaagatcaggcaaccctctgagaaagatgtaggagaaatgcctgattaaatttcctctaaggctctgtccaataccaagattgcaataagggtgtttttgttgctattgttagttccctttaatcttgatgtggattaagatcgctatcctaaaatagagtttttggggttggaacaaaatggcctattttaggaacaatcataaatggatttgtgattactgacttttaaaggcccataatgataaattggaatagaagataacccatacctggtaaaagagatgcaaaactcatgatttgactagtttctcattttagtagacaaagccttactgagcacgtaggattggtttgcctctgatctcctctgttcaggttcagggctgtgatgacccattcaggctgtgggattttggttcagaaatctgatcatctgatccctctcaaattctctcctggaagccacctctcactgcttatgaagttgggggattacccctatgaatccttgtagagaagtctcaccttcatgaatccttgtagagaagtctcttttgagatgatttctttttttttttttttttttttttttttgagatagagtgttgcttttgttgcctaggctggaatgcagtaacacagtctcagctcactgcaacctccactcccgggttcaagcaattctcctgcctcagcctcccaagtagctgggactacaggcttgagccaccacacctggctaattttgtattttagtagagacaaggtttcaccatgctggccaggctggtcttgaattcctgacctcaagtgatccacccacctcagcctcccaaagtgctgggattacaggcatgagccaccatgcccggcctcttctgagatgattttaacttatttttctcacattagtacttgagaaaggaaagttatccagttaagataggtttttttttttccctttttctttttcggtggaagttgaaagtaaaaagaaaagcaaaccctggttgtgtggcattcagtcaactggagcttggttaactcactgcccaccagcttatgtttcgtcagtcatcttgggcacttccaagatattgaagagccttctgaatcatcaagaaaaaacaaaatcttgttactaatagttttcatggtaagcgggtttggtttcatcatcatttattgaaaaatggcaatctgtatataacattactgggcaccttgctatgtgctacctcaaacgagtcgattcgccaaatactccaggaccccgtcatgtgaactggccgatagcaaaacacatccctgaatgtagtggagctgtttgatgtgagaccactttcagacatggaaatgccacaaggaggagagaagggtcctgtcctcataaagcttgattctaggcctttcactattcaaacaaggaagagttacttcctacccctccaagggtcaaatgagacctgcacctggggtgcctccggagcagagtgcactggaaggttcaccgcaccttctctcctgaccctggtgctgtgtctcggggtcaccgtctgtctgctgtgcctgcctgcatcataattggaacctgtgctgtgttgtactcaatctcgttttctcacaccactaattgtgtgtagcacttcctgtgtgtaacatttctcctactaacctggcagtttttctcctcctcctgtcttttacagggctgtcatgtccgcttcttaaaggtagttcttcctctgctctttcctcatccactttccttccacaaaacacttgccttggtttttgtggctcccgggcctcagcctgcagccatgctctccacccttaaggatgcaccgcgtgttctggtagcttgaatctcacacctacttgtgtcttagtctgtgtgctcccttccaagcagccacggccctcccatgaaaaaaaatgccatgtcttaatcacccagagaatagaccagtctcccctcctcttcagattaggttagtttaaaattttacctgctgggcacggtggctcacacctgtaatcccagcactttgggaggccgaggcaggtggatcacccgaggtcaggagttcaagaccagcctgcccaacatggtgaaaccccgtctctaccaaaaaacaaaaaaaaaaatacaaaaattagccagtcatgatggcaggtgcccgtaatcccagctactcgggaggctgaggtaggagaatcacttgaacccgggaggcggaggttgcagtgagccgagatcgcaccattgcactccagtctgggtgacagagtaagactccatctcaaaaataaataaataaaataaataaataaataaataaaattttaccaagcaaatatcaaaacctcctatcagtgattaaagttcaagtctgtattgaaagcatccatccaatgaacagaaagagtgcatctttaaatggacagctcattttcctttctttctgttaatatctttcaatcacatatgagttaagattcattttaagttttataggcatacatctgcattagcatgcaatcagtatggtgtatttacactacatgagtgtgttcatatggatgatgtagtgtaatatatcataggctgaaatcctgtaattgttctgatgttcttaatgcctgacttaatccttctcactcttatttcattttttctcattttttaatgttttcccaactcaatcgttgcaatctaatcaaccattctatccccaaactatggaggggaattttgcaacttgcatgtaaatggttttaaaaacctggtctattattgtcatttctgatagcgccactctcttctgggaagctggttagggccacacaccagctgtgctctcagcgtattgcctgtgttcgtaattaaaatcagcccaagattgtcgcagtgcttttatgttcgcattagatcaaactggaaaatttaaaccctcaaatgctcgggtggaggatttgcaaggggagaaaccctactccccgaccccaagctggaatccacatctaatgctctctcaaaaacactgtcctaaagacagcatctaataaataatgtttttagagtttctcatctctagaacttgtatctcaccctgcagatgtgcctgttagaggaaccacaggagatttgtgacctagagatactggaaatgagaaagaaaaaaaatattccttgaggtttcctaagtcttgcagagtgtggtaaatactgtgtgtgaaaactgcctttcaaggcttctgttgttactgccccccctccaccccgcccttgtctgtgtttgaaaaccctgtcccatgattcaatgcagggtgttgactttggatacacatctccagaggctggccacacctgaatacactgagcctctgtgcaacttcttcctgtggagtaaaaccctccagcattctcagaggaaagaggcacctcttgatcactccaggaggtggaaacagttcctgtttaaaaaccaagtaaacccctctcattgcaccccctgctacttcagaggaacacctccattctgatggaaggaactcgtacttgggtcctggaaccctatttgggacccaaacctctcccacttgtgtggcctgacgtgcctgagtgctgtttgtgtcctttttattatgttgaaaactttgttattccaaagaaacatctgaatcacagagcttagtttcccagcatgtcggaaagctgggtgctggtgtaaaaaactcagatgtggctgaaaagggaagtaatgagaggggagaaaaataagaagaaagagttagggtgaggctttcacctccctgggttcttgcctggctcctcctagctctaatgaagggctgtccctgtccccttctccttaaagactgtccctcttctcccacctgctgggcaacgtggctgtcacctcgtcattccaagaaggcagcagggtgtggcgaggaagtgccacactgcctgggttcaagggttcaaatcccagctccaatatttcatagctgtatagcctggagccatgcagctcatctctcttgcctcagtttctccaagtctaaaatggaaatggtaaaaggaccaacctcctagggatgttgggaggattaaatgagtaagtatggaaggtgcctagaacagtgcctggctagatttgtgtttgctgcagtcattactcagccttttctctgccttccatccccaggaattatgaattacagagttttccctaatggaggtgtcactgtgcattgctggtttccaagaagccattgccaagttaaagtgaaccctttgttgtccttttttttttttttttttttgagatggagtctcactctgttgcccaggctggagcgcaatggtgcaatcttggctcattgcaacctccacctcccgggttcaagcaattctcctgcctcagtctaccgagtagctgggactacaggcacgcgccaccatgcccggccaatttttttactttttgtaaagaaggggtttcaccatattcaccaggctggtcttgaagtcctgaccttgtgatctgcctgcctcggcctcccaaagtactgggattacagtcgtgagccaccgcatccgacctcattgtgctttctaaaccactcccgggccccagttgggagaccccggttgtacattaggtacaaataacccatcagataggaatctgctccccgtaccccaccctactcccacctgcagcagtgaagcaaggccatcttgaattcatttaagaacagagatgagaagtgtcaagtcaacaaagtctcttttctgacatgttttgtgttggtgcttattatgtttcctgtgtggttttgttatgaggacaagaaacaggctactctacctgagaaagaaaatgtcacccgcatgttggaaattcaccctgacccaggcagtgataatagcgtgccaccgctcgctcacacctctcttcaaagtggcttccttggcttggtcatgagctaatctttaccttgtggctttttctgaaaatagacttgtcaacactcagtccgagtctggcccccagtcactggttttctctgttgacaggctgcaaagaatcatgcaggaagggctctgtccatgaattcccaatggtcatgggtggtcagccagctcagagctgatggtttgggtgggggcaggcaggacacagccatagtctcagctcttactaggggtattcgttttgtgactcacattcccccaggtgctcacagcctgtagatacccttagggtcacaataattgtattaatttagactccctggctctctcctggcccattgacaaaacctctgttcacttccaaagcccagcagttgcagctgggagatcccaggagtatctcgtgcggtggtgaagtgatccgatcacacacctttcctctccggtgtgaggccctctgctttgaggccacttgcatcccagccatgttcccccccacccgctgcttcctttggggagaatgcccccttgtgagtccacgcccccctcaagctgccaggcctcatgcatggggccagagagctagggtgcaaataccatgtgtaaagggaaaagtgtcctgacctcagctgcccttgtgccctcaggcctgtgcccaccgttggagacaggaaacacctacctccaccttgccctcaggcagcccctcctgctggagaccagctcctcagtcctgtccaagtcccctgagggcagctgggaagcccctgtctttttaggagaggtctcactgttccaccccctcgtctcttcccccttcctggaatggaaatttgtcttctgacgctgccacctggcagcaggcgatggctgtggcgagactactcagaatggcagcagccaccagccccgagctctgatcactccctcaccactgcaggatggcgaggctcccaagcctgcaggacgagaaagggagtgttgacccattttacagatgaagaaacaggcctcagagaagtgtgcagtgcctttactggtgtcccagaccgctgctggcagaccccagatcccatgcttgtcaccttcctgagcgcctagtgagctgcctgacacagagggcccagagaatagcccagaacagtgcagctgctgctagccttggaagcaggtgtcccattgagctataattaggccccttggttttaaaaactggtgtggattaaaaaggctcagtgagggtaggatgaaatcaatgattatggaaatattgtgctaaatttaatgacagtcggccctgctttcaaattgcttgctcctgtcagagacattttataaaaattttccgttgagtagttgagcagtgtatccagcatttcggggataggatgtgttttgttttttggtttttttttttttctctgtgaggatgcccagtcatcctgtttttcctttctgcagcagctgcacagccatggagggaaggctctggaaccttcttccttggggaactgggttttattgccagttatagcttgggtgcgttttttgttactgttttttattgacttcaggagctgctgttctgtgctcgcttagcttcaattggattttcccagaagtggctttttcattgaactctgccctcgtgtaactgtcgttacttctcactattttccaggtcgttctttgtttctaagataaacaccgtggctccctcggaccactccagggccccctgcagccctcactgcctcccttccccccaggccctttcttggatctgtggcttgcagagtctgcacccagtcaagggtttggaaagattcgggagacacagaaaggcctacaactgtttggatctttgttttctagaaatagagcacccagagatcttaaaacccacttttggcatctgtagttccgttggcactctatagttccgttggcattttgcaaagtcctggcacttacgtgagtgattcaggtcatctactataaaggatacagttttttttttgcatctgcgtagatacaattttgtgtcttgtttgtgccatcttgccccatttactgggacttcacctcggtaaggcagactagtgaatcttaggtggatctctgctaaaagatcccagccaaactgcagttgcttcagaaactgaataccacaagagggcagtaaagatttgcaaatgaaagattccatgacacctgcacacaacaaacagcaatcaactgttgcctggatgtctttacattttagtggacatagagatgagatcaccaccttgtgctccccattgcttcttggctttagaggatcttcagtgtgctgcaaagaagtcaagggtttcccaagagctggatggctccttcagtctattcttgcttgcactgggccccagcccattttctatctccccgggtttttttttttagcaccagagaattacccacttcgaagccatgttgctgacagtctgaaaaactatttactttgatgatgtttctgagttcatgtgattcttgaccctgccacagccaacccataaagccagtgtggtggtaattccaaaggggagcattcgagcaggaaaaggaataggtttccaaaaatgattaagtgcccaaagttctcgaacaatgctatgtcatggctgttgcagtgcgcactgggccttcctctaagccgggcatcagacgcaagtgtgccatcagctagctccctggtgggagaaaaacattgttgcagatggaaaaacttaaggtcattggtggggaatcctcatgtaagcctggagatttagcaattggggagaacgcggtacaagggcaaaccgcctttccaggaggtgtttagcaggtgagacaaggcgtgcaccaccaagattagcgatcctaacagatgtgtcaattatcaacagacaaatctgggaaacagggaaaaatttggttggctgcaaagaaaatcacacaccgggatactagaggtgaatattatgtggtatgaaaagaaccaagcacttcgcagtttccacatctggcaaagtgccaacacgtcagggtcccacgtttctccttggagaatggctcagttgccatgacaacggaggccctctcgctgcctgtgaatttattttaaccgtggcaacagccaaagtgggtgtgtccatgaaaatatttcttgttaagaaaacgattgaatgtgttgcccttacattttgctctgctgaatacatacttcattcaccaccattgtatggctgcaaaatttccttttcctgtgctgcctggcatagcaagcattgtggaagagcctgaatagtgatttaattctagtgctcttgagattcttaattgtcgctgttgtgatagattaagaagatacagacattgtactgaaatctaactgcaaatgaggatgagtgatttgagaacctgcgtgatacagggcaagggtcatcgaactgcaatccacagcccagaccccagcggctgcctgtcttcaccattaaggctttattggaacaccttccctcctttactcacttttgcagctttcgagctacaatggcagagttggagagttacaacagagacagtatttggcccacaaagccacaaatatttactatctggacctttacagaaaaagtttgctcaccctcgatgtaggaggaagagcactaggttcaaaggctggagttctggattcagagctcaggatggaaaactgatttagacatatcgcggtgccccctgggctcattctcctcatctgtaacatgggcagccttgatgagactatccccaagttgcttttgaattctaaaagctctgtcatcctcctgctgttagtcaaagattacagcccagatggggcaaccttagcacagggaaacgtacgggatgatccagcatctagtttcagggcctctgtagagaacagagcgtccttctcttcctccaccagcactgccacgaagcggcgcagaggctgtggtgaagttagctctctagacctcagcatcttcatctgcatcctaggcaggtcagactccccagggacccttctgtggctgacagtctgtggttctgaggccctcgctgcagttgccagcaggagaaagaatgactcatgcctgtgatttgctggtcacctgtgattcccgcctccgggagaaaactccaagtagcaggtgttgacccagttgtgtgggaggaatcacccaggcccttatttccaggttgcacttacagatcggattgtgcaaccagaaaaatgccgtcagaaggaagtggggtggcttgggggactgacttactaaggatcactgttaagctctccatacaaattagctccccttctgtcttagtccactcgggctgctatagcaaaataccataaactgcatggcttacaaactgcatatgtttctctctcttagttctgaatgctgggaagtctaaaatcaaggcaggtgaggtgtctggtgaaggctcactttctgattcacagatggcatcttctggctttgcccacacatggtagatgggatgaggagcctctcaggcctctttttattaaagtttttattatttagagacagggtctcattctgatgcccaggcgggagtgcagtggcacaatcactgttcactgcatcctcgaattcctgggctcaagcaatcctcctgcttcagcctcccgagtagctaggactacaggtgcacgccactgtgcctggctaatttttaaaattattttttgtagagatgggggtctcactgtgttgactaggctgttctcaaactcccagcctcaagctatctttctgcctcagcctttcaaaaatgctgggattagaggcatcagcctgggatcacacccagcttccaaggcctcttttataagggcactaatcccattcgtgagggatccaccctcatgacctagtcaccttccaaaggccctgcctcctgacaccatcatcttggggctaaggatttcaacatgtgaatttgagggagacacattcaaaccatagcaccttccaagaccactttctgtgttgtggaagaaaagatgtgtttttgttttgacatctgaacataaaacacatatacacagccacatgtgagaaagaagtacagttaaaaattccaactgtgaatttagacacacaacccaaaagaaaccaagagcctgccttcaggaattaggctgccttgactctgggcttcttcctcttctctttgactattcatggtgagattaaaatgtctgtccttgtgcagctgggcacaagggtacttgtttgtgacctccccaaaaaggtcacaaacaagtaattaatgtttcattcatccaggaatctatcctggggacttcaaggatgcacacatatttagaccacaaaattgttcatctgcatgtcattgaaaacagaactaggaaaaacctaggtgtctaacaataaggaatggttacatcagctacagtagagccgtgtagtaggatatgatgcagtcactcaaatcatgtggcagaagagtgcttataaccagaagttcacaataagcaaaggggagaagcaggttacaaacaatctgattctatctgtatcacataggaaatcatgaaaagaaaggattaggaaaatgtccaccagaatgttattaatgattacctctgggtaataaaattataagattttagtatatatgctgccaaaatgagtataaaattttagatgttttaggccagccgtggtggctcacatctgcaatcccagcactttggccgaggtgggtggatcacttgaggtcaggacctcgagaccagcctggccaacatggtgaaaccccgtctctactaaaaatacaaaaattagccaggcatggtgacatgttcctgtaatcccagctactcaggaggctgaggtgcgagaatcgcttgaacccaggaggcagaggttgcagcaagccaagatcacaccgctgcactcctgtctggaagatagagcgagactccgtctcaaaaataaataaaaataaaattatagatgttttaaattttgttctcttttttctgatgtatccatgcctgttagattttctaaaatgagcaggtatacttttacaacaagaggcagccttgctgtagaaattattttaaagcaacatttctgcctcttaaaaatgttatatgaaaagctgccttccccatatactctactcattgcttctgcaaatatttgaggaccaccatgccccaaacaccatcctaggcactggagctgtgccggggaacaaaacagacgagccgtgcgtgctcatcccagtggccgaagaaagtaacaaacaagtagagaaatacaggattggtaatgagaagagagggagggagtatgcaccacagaaaccggtgcagggacaatgtcagaaggagtagggagcctcggggctaaagcatcctttgagcagagatagaagggagtcccgtgcctatctgggtcagaggaagtgcccaactgcaaaggccctcaggcggcagcgtgcttggcgtgtcccagcagatgaagtattgagccagagaacagcggacattttatttactctaactgtgctacccaggaggctgtcatgcccattaagtagcatcattttaacctgttgccccgttaccgagtagaagataatagatatcatgacttggagcttattagaaatacacaggccatattccactaacgataccgtgaaaaccctcagttcctttgtggctttctgcttcgaaacacttgatctctcttaactaacgttgcagtgggtgcaggtaaaggcattaccttagaggtatgatgctgtgctgggcatccttggttatatatggcatggctatttctgttaaccatgccctgttacatggaatagcaatgaatcaccatcagtgttgttttgccagtgttgttcagattagctgtgaatacagaggactttcatcgttgtacaaaaaatggtaggagaaatccacaattattcatttgttcctatggttggtcatcgttggcctgtccgtggaatcttagaagtagaaagaagcttctgttgtcatctctccacacgttgcaactgtctttgataagtatattactcaaagccttattttcgagaatgctaagagatcatgtatttttgaagacatatttacaaaataggtgagaatgaacacatttaaagtggaatgtagttacgttactggaaagaagtcccaatccagaccccaagagagagttcttgaatttcatggaagaaagaatttggggcaagtccacagagtaaagtgaaagcaagtttactaagaaagtaaaggaataaaagaatgggccgggtgcagtggctcacacctgtaatcccagcactttgggaggccgaggcgggcggatcatgaggtcaggagatcgagaccatcctggctaacatggtgaaaccccgtctctactaaaaatacaaaaaaattagccaggcatggtggtgggcacctgtagtcccagctactcaggaggctgaggcaggagaatggcgtgtatccggaggtggagcttgcagtgagccgagatcgggccactgcactccagcctgggcaacagagcaagattccgtctcaaaaaaaaaaaaaaaaaagaatggctactccataggcagagcaacccccaagagctgctggttggctatttttatggttatttcttgatcatatgctttaaaaggtgtggattattcatgagttttctgggaaaggggcaggcaattcccagcactgaggggtccttccctttttagaccatacggggtaaccactggatgttaccatggcatttatagaccatcatggcactagtgggagtgtcttttagcatgctaatgtattataattagcatataatgagcagcaaggaagccagagggtcgctttcctcgccatcttgattttggcaggttttggctggcttcattactgcatcctgttttatcatgagggtctttatggtctgtaccttctgagaacagtcctgctgacctcttgttttatcctgtaactaagaatgcctgacctcccaggagtgcaaatgcagcccaacaggtctcagcctcattttacccagctgctattcaagatggagttgctctggtttgaacacctctcacaattagacattaaacagtacttcagaggctgcccaggagttctatgatgatgagatggacccaccgggagccctggagtaatggttcagtttctgattcttaactgtagatgaatctttggacctgtattcatactggagataaatcagcaccccttgtaagaatttctggacagagggctattgtattagaggtcagaaatttctatttttatggtctgtctgattttccatatagtgtatattcattatataaaattcaaacatagcagagtgtctatggtattaagttaaaccctttgaaattgctgttaaggtgggttagactgtcacactgtcacagcttagcagctgcaaacttttaacctattagaaaatgaacgtctccagccatccagcccctcatagatatacaatgtaagtcatttgtcacaaccaccctcaattttaatttgaaaaaacccctaatagggagctgaatgtggagagcttctcacattacacatggatagcttcagacacagatgtttttacacatgtaccataacccccatgtaggcgaatttgggtttgcaatattcagattcattttgtatgatttgctttacagaatgccactgcaggagctctttgaattgttaatagcttcagtgattgcaaactattgtgacttttcaagaatgtatctgtggtataaagtgagacgtgtcagtcatcagtaaattttcaaatgaggagggaacactgcctggtctcacagcctggtcttccaagtggcatcacaatgccaaacttgaaccaaacgtgaatatgccattttttgaggaacctaaaaatcctggattctgggttgttgaatcatagccaataaactgtgaggtactttagtcccattttgaaaaaaagagcatgctacagcttctgcatttaatgtcacttcattctattcacaacattacatattgtagttcccatttttatttccttttaaaaatttgtgccattttattaagtcagggtcttttcctactgcagtcttaacccagaccccttagagggcttcagcaggctttccggaagtcagggtggatagctagagccaagacccattgcctctcctgccccccttaggagggtgtgggagcccacggggatgtgcctcaacctcacaacaggtcatgagctcctgcaaagcccatttgtagcctcacacatctctgcaggtcacaggtttctggtctgtgagttagcccacagaactctagcccaggcagcatgcagttgctcattgaatcccagaggccttcagtgtacagtcacggagcaggtgcatgccagaagcttgaaggaaagtgcagtctcctgcactttgtctcctttctgggtcaaagcaaagaagaccagagtaatgttgggtgcggtggcttctgcctgtaatcccaacactttgggaggctgaggcaggtggatcacttgaggtcaggagttcaagaccagcctggccaatgtggtaaaacccatctctactaaaaatacaaaaattagccaggcatggtggcatgcacctgtaatcccagctactcgggaggctgaggcaggagaatcgcttgaacccaggaggtggaggttgcagtgagccgagatcacaccactacactccagcctggtgaacagagtgagactccgtctcaaaaaacaaaaaaaaaaaaaggaagatgacgaccagggtggagggaataaagcatggggtgctacactagagtccttttgcaaaggataccttatttcaccttcagtgcagtccagagagagagcccagcatagtccagggacacagtcttcttactactatattacagataaggaaccgggggctcagagaggcagtgtcatttgtccagagtcacacagcaaaaatgggtaagattaagatttgatccgagctctttggaatccaagttcagggctctttccagagttgcccactggttttatataataattgaagactgtggacggtggaaagggtctcagagacgagtgaatttgacagggatgttggaacttggagaaatgtcccaactgtcttagatcagcatttctcaaccttaaatgtgcacaggacccacccaaagattttgtttaaaatgcatgtttggacttagtagatctgggatggggcccaagagtctgcatttctgccaagcctctagctgatgctgctggtcctaggaccagtgcccagctacttgggaagcttaggcaggagaatggtgtgaacccgggaggtggaggttgcagtgagccaagatcgcgccactgtactccagcctgggcgacagagcgagactccatctcaaaaaaaaaaaaagaactgaacagacatcatcagagctgaaaggagattcctcctggtgcaggggtggaggacagtttcacaggaggatggcagcactgagagccatgggggtctccagcctgtggactgctgctcagagcctggtcccccaccgctttctttacctaacttggaaatgagtgagatggactcaagatttgggacacatcagcaggagcgtttctaatgagttaatatctgcttgaggtcagcagcccagtgcatgctctgctctgagcattcattcatcttcaggggacattctgtgtttctgcatttcatcctctgcattcagaattttccatttgctcaggcccccagcagggcgtctggccacgttgggccgtgtttgtattgctggagtaaaggatgccagcacacttactcttctgcttcctcaggttttctgaaatctctgcagttaggctgttagcttcagctttatccctagacgtatattgattttatttgcactcctggtgaagtctgaattatagtcatgacaactagagttatgtcaacaatatgcaagccaggaagggcaggtctcttaattctgctgggaggccagttgccaaacaatacattaaaaagctcagagaaagaaaaatggtcagctcagggctcactgttgctcttgagccagagatcccagctggatcttgggcaagccagacttctcagcagaggaatagcccttcagagaaacccttccaagggcatggtttcagcttgctggcctggctaactagtctcgtgtggcctctggggagggtcatcatgtggccaaccaccctaaaggcagagagccctcccagcacttctctgtggctgtcccagcatgaacagtgattgcttgagagaaggagttcagattatgtatgaaggtgcaaatgcatggagttctgggctgcttgtctgcaccagctcacctgactatcagctgcctttttatgttagtttgtcatctggccaactagtgctggctacaagttggcctctgtcagttctgtcagtcttagtgcttaatgagcacaaatgtgaatgaatgagagagagaactctgagttttgaatgcatgtgcctgatatagtgcttggtctcaagatacaaacttgagtaagacttggtccttacctcctaggatctcacaggctagtgaggaagacagatcaataaatccaagaagaagaggctgggtgtggtggctcacacctataatcccagcactttgagaggctgaggtgggtggatcacttgagctcaggcgtttgagaccagcctgggcaacatggtaaaaccgcatgtctacaaaaaaaaaaaaattagctgggtgtggtgatgtatgcttgtagtcccagctactcaggaggctgagatgggcggatcacttgaggtcaggaggttgaggttgcagtgaaccatgatcatgccactgcactccagcctgggcgacagagtgagaccctgtctagaaaaaaaaaaaaaaattccaagaaggaatgtgtgttaagttccccagaagctgacgtagccccatggttttgagaagttcattcctgaagggatcccaggagacatgggtggggagtagagatgggagccaggtaagggtaggacctagccaaggttgtgttctcaagctgatgaccactgtgggcagctggagctcggtcttcttgtgagctggaagaacattctggaacaggcttcctgttcccataactcgggcacctcgggctccctctgcaggagtggtctgaatggaaccctcaggtgttcgcaggtgtgcaggacagaaagctcaggtgtttgcaggtgtgcaggacagaaagctcaggtgttcgcaggtgtgcaggacagaaagctcaggtgttcgcaggtgtgcaggacagaaagcgcaggtgttcgcaggtgtgcaggacagaaagctcaggtgttcgcaggtgtgcaggacagaaagctcaggggatacgggtggggccctgtctgctgcaggttggaaattccagagaaaccaaaaggaggcacttgagttggactttgaaggtgaacagaacagcaagacccctgccctcccagacttgcagtcaggtggcaacggtttccgggaagaaagctaactgggagaaggaaggagtgttggggtttcaggaagaccactgtggaggatgactgtgaacagcagaagagggaagggcggagctggcgtcccaaggcaggagacaggtgggagcttgcggcaggctggcatggctgggaccgaggcggagggagtggtgggaaataagccgagagacagagcagagcgagtgtcctcctcagccatcaaagcactcagccttctctctgtcgtgtgggaagccggtgaatccaggacaggaccactgtcttttttttttttttcgagacagggtctcactctatcacccaggccagagggcagtggcacgatcttggctcactgcaaccttcgcctcctgggtttaagcgattctcccacctcagcctcccaagtagctgggactacaggcgcccaccaccacgttggctaatttttgtattttttggtagagacggggtttcaccatgttggcaggctggtcttgaactgctgacctcaggtgatcctcctgccttggtgtcccaaagtgctgggattacaggcttgagccaccgtgcctggcttctgctgtcattttagcagtagcccgccagcgagagcaacgggacatctttggggaggggttttgctgcccgtgggctaggggaggtccccaaacgctggtgggacctcgacctcagctggtgtccaggctcttgatactgccacgggaaggaattcaaggatgagtcagaaaatagtgaaaaatatggagatttattgcaaagtgaccagtacacacttgagaaagggaaaggcaggcatactccagagagagtggcgtgcaagggggtttggggcctgctacctttatgggcttctttaaggggtgggatattcctgaagattcccagaaaaaggtggagatttctcagaaatgtggtgccacctgtttttacactaaatattggtgttcctggaacggccgtggcactggtgggtagaggattgaggatgttaatgagtggacagtgaggtcccaggtgaaactgggtcaaatccagcaccatgttgggtccagttggtcttagccagcttggcccacatcctgatgtttagggtcttgtgggcccctagcttatgcagttatttcaacatttttttttcttttttgctagtcccgtgaaactgctgcctggaattttctgttctcctgctaccaccttgtattattcctgtttgagttttcttgaagaaatagcagttgagctgggacctgaagaagtgggagaggtcagccaggctagggatgggggagaaacggcaggccagggaaggctgggtcttcaggaagacagaggaggtgctggccaaaggtctggaggtcaagcctcgcgctgcatctgatcttgccctggcgccctgcccacctggaagtcctatatggttcctcgtccccctgccctcaggcatcccccacccccagtgatgtagctgctcggatatccactggctgtctccctcaaccccagcattgattagacccagactgaaagtgggacttgctcaaagccggcccagacccctgaggttgccgtaccgtggagtttcctaccataacagagctgctttcaaaaactcagcattggatggctctgtgtcctttggcagcaaggcctgcaggtggcagcgtggagatggctcagggagtgtgttctgtagtggaaacagaagtgctgctcttgattgggggagcaagggcgtgaagatgctgggtctgctctgatctcagggctggcttgggctggggagaaatctattctgaccctctgggccaggccactgagaagctacctctctgatatggacgtggtcagcctgccctggaccccacacaccggtctgtctccttcccaaacagctgcctgttctaccagcctccagaaactcagctctgcttccggctgaaaagaatctgcccaggcagagcaggaagcgtgtggcgtcctctgcccagctccaccttgtgcgagcaggtgtctcctttgtggatattgctctcaaacctggtgattgatttgagacctgaggccaaggtcatattgcaaataagttcagaagtacttgaatgtaaaaatgcttctgtcagcctttagcctgactgtgagcagtgtctcatgcttataaccagactaatatgataacatgaaactcacaaggccgtcgttaggttatgtctgcagttgaggcggtagatggcaaagtgtgtaaaaaggccccctgcctatctggaggctcatcactgcatcagcccacatcccctgactgtggtggtgacttgtcaaaggaggaaggcggaatgactgtctgggaatgtcagaggagtccagcatagctgggtagaactgcgtgctacagttggaaactgggcattcgttggtagtatgaaccgcaacttcacccaggtgaaagtagtttttaactgtttcaagcatctcagatcagcaagtcagttgtgtttgggtgttttcagatgttattgtgaatcctgagaaaatacgattaatctgtgcctctttctggtaacttttttcttattctaagtcagaagtgcagagcagggtggcatagtcggtattctcatctcaaatttgcacttcctatgtattcttttaaatttagacacaaccaattgggtgcggtggctcacacctgtaataccagcactttgggaggccgaggcagatggatcaggagttcgagaccaacctggccaacacagcgaaaccccatatctactaaaaataaaaaaaaattagcttggtttggtggtgtgcacgtgtaatcccagctactcaggaggctgaggcaggagaatcgcttgaacccaggaggcagaggttgcagtgagctgggatcgcaccactgcactccagcctgggtgacaagagtgaaactctgtctcaaaaaaataaaaattaaaaattaaatgtagacacagcctaggaagtttctcaacttagaatcattgccggggccagtttttagaggactgggctggccctgccgaagtgggcaggccagtatgtgtagcatcacagttcatgttttatctttatgggccttctacgtttccagtggccccaaattcacaggtgtttccactacatgctgccaacaaaggcagagctcagccgtgtttcacactttcagtctggaagcaaaaatatcagggccatctctccctcatgttttaatgtctctggtcaaatgggggcactcaactcatcagagcatgttcacaagccctgagacttgatccctgtatgagcgagttattctttttttttttttttttttttctgagacagagtctcactctatagcccaggctggagtgcagtggcacaatctcacccactgctgcctccgcctccccagtcccagttcaagcaattctcctgcttcagcctcctgagtagctgggattataggcatgtgccaccatgcccagctaatttttgtatttttttagtagaaacagggtttcaccatgttggccaggctcgtcttgaattcctgacctggtgatccacccacctcaccctcccaaagtgctgggattacaggtgtgaaccaccatgtctggccacaagcaagttattgttatcggagaaaagcatcacccaacagcacagcatctgataagcacatttgggcttcagttctgtatttgttcagccagagagctgagtgcatgtcctgtgccaagcactgttagagttgggaatctagacacagctggcagtgtcacagggtgaaccccaaaattggggttcagcctaagaggccacatgggttcttggctttgggcgggagggaattcaagagcaaacctacagagtaaagtgaaagcaagtttattaagaaagtaaaggaataagagggtggctactccataggcagagcagccctgcaggctgctgattggctattttggtggttatttcttgatcaaatgctaaacgaggggtggattattcatgagttttctgggaaaggggcagggaattcctggaactgaggattcccctttcacaccatgtagggtaacttccacatattgccatgacatttgtaaactgtcttggtgctggcgggagtttcctatagcatgccaatgtattataattagcatacgatgagcagccaggagacctgagactgctttcattgccttgttgattttggcgggttttggctggctttgccacagactgttgtattaggggttctttgtgacctgtatcttgtgaaaccagtcctgctgaattcctgtatcagcaggggctcctcctgcaaatgcagaggctccccaagagagcacaagggggctcaatcagtacttgtgggatgaaggcatggtggtgctccaagagggacgacggatgattcctcggaagccttctctgctgctgatccatagtaaagccccttgagtgccttccttatctccttcaccatcatcttggtaaccaccaaggtgttgactggagtgagttcctggaaagagctccagagctaaggtctgctgcactagggagggaggtgcaccctctcattaagaatgggcaggcgtggtggctcatgcctgtaatcccagcactttgggaggccgaggtgggcggatcacctgaggtcaggagttcgagaccaggctgcccaacatggcgaaaccccatctctactaaacatacaaaaaaattagccatgcatggtggcgaatcccagctactcaagaggctgaggcaggagaatcgcttgaacctgggaggcggaggttgcagtgagctgagatcgcgccactgcactgcgcttcagcctgggcaacaagagcaaaactccgtctcagaaaaaaaaaaaaaaaaaaagaatgtatccaaggcaagaatcattgccctagggctcagggatgtggctgtggaggtctagccagggaccagggtcctggacctgtcagcagctgacgcttcttacaactagctccttcccgtcaggcagatgttcaaaattcggagtcttgtgctgggagactcagcccactccaggcttctccagggctccttcggtgacagtgagacttcccgtgggtttactgaccttcctttttctgctgagcccttttaccttttgcctttgacatggactctgaggccctggtgagagtcgtgagggcagggccccctctagagcttctaaaaactcctctggtagctcgcccaccaggcagtgaccagatattcttcaggcgcaaagggcgccttgtgctccctttctttttttttttttttttttttttttttgagacagagtcttgctctgtcgccaggctggagtgcaatggcgcgatctcagctcactgcaacctccgccccccgccccccggttcaagcgattctcctgcctcagcctcccacgtagctgggattacaggcacgcaccaccatgcccagctgatttttgtatttttggtagagacggggtttcaccatgttggccaggctggtctcaaactccagacctcaggtgatccacccgcctcggcctcccagagtgctgggatctcttcttatgcacatcaccatgtctttttgtgagttcaactcttgatttaaaagaaaaaaaaaatcaaaaaaaaaaaaacaacccaacccctgttcttactgtgcatttgaaaatagcgatgaatcatcccaatggctttgccattttaagcagttcctctccagagaacattttcctcccttttggtgtgggtacaagttttcctttatgcagattaattttaaattggaaaatctacaaatacaaaaagcatcagtacacagtttatttcctttattatgttcatggacccgaagcactgtttttcccaagaagtcgactttgacatactggaattacaaccaaccagcccttcacggatccccacgcatcaattctaggttgactgtgtaaagagttgtctcttaatagggagagcagttttctgctaccttgctgactttccctgtagggtgagtgtagctgctgatatctgaacaggtactcaattctcaccctttgttccttttctcaccccatcccacctccaagcaaacattaaactcagttacaacacggtggtttctgtcactctttccccagaaaaatgacccacgtgtttcccatttgtgcttgttatttagaaagccaaacttggccctgctggcaacaaagtcatcagtccctctgaagacaggaaacaaccttccaacaaccttgaccgagtgaaactcacggacttcaatttcctcatggtgttgggaaaggggagttttggaaaggtaagaggacagtcgtctgcaaattgcaggggcttctgcagagaatgtcgaatcagttttgttctcctcgtagtttgcagaatagcacattagatttccctgtgattcaaggtcaggagatcaagaccatcctggctaacacggtgaagccccatctctactaaaaatacaaaaaattagctgggcatggtggtgggcgcctgtagtcccagctacttgggaggctgaggcaggagaatggcgtgaacctgggaggcggagcttacagtgagccgagatcgcaccactgcactccagcctgggagacagtgagactccgtctcaaaaaaaaaaaaaaaaaaagatttccctgtgatttgtacagtcatccagaagaccaccaggatggctaaatggtagaaaggagaggtttattggtggtatcagtttgcaaacccataaaagaaagtctatggtgtgaaatgaaggtgccctctctttgaggagagaaagggcaggttgggttttatgcctcacagggtccatgttacacagtagagtcatccatattcaacaggtttggggggaaagcttgacttatctgtgagggaagcctagcacaggcacaatggatgaacatatatgtaacatgcatcttatgttcactttggggtggggacttagcattaaaatgaggtggaatttgcctaggcatggtggctcatgcctgtaatcccagtactttgggaggccaaggcaggtggaccacttgaggtcaggagtttgagaccagcctggcaaaaatggtgaaaccccatctctactaaaaatacaaaaattagctgggtgtggtggtgtgcacctgtgatcccagctactcgggaagctgaggcaggagaatcgctggaacctgggaggtggaggttgcagtaagccaagatcatgccactgcactccagcctgggcaacagagggagactccgtctcaaaaaaagtaaataaataaaaaaaggtggaagttggctctttagatcaaaaggtgaaccacaggacccaaaaacagtttgtgtgcaggctctgcaagctgctgaaactggcttcaggtctgcagttgcatcacagaaaagaatgtttgtaaggccagttctctgtccagtccaagtcatagtgatctgagttgtcaatcaaagttaggaggggcctgatagctcctactgctagggagtttagcgagagtggtttatcttgtagctgtagggatttagaaatttgccatgccagctgggccctgaaccctcaacccatagataactatttccttaactttaatgttaccagaaaggggtcctgatccagaccccaagaggagggttcttggacctcaagcaagaaagaattcagagcgagtccacagaataaagtgaaagtcagtttgttagagaagtaaagaaatgaaagaacagctactccataggcagagcagcagcatgggctgcttgactgagtatacttagaggtatttcttgatcgtatgctaaacaagggttttattattcatgagttttctgggaaaggggtgggcaattcccagaactgaggcttcctccatcttttagactatataaggtaacttctgggcattgccatggcatttgtaaactgttggggtgctggtgggagtgtcttttcacatgctaataatgcatataatgagcaatgagggtagccagaggttattctcatcgccatcttggatttggtgcgttttggctggcttctttactgtatcctgttttatcagcagggtctttctgacctgtgtcttgtgatactagccctgctgacctcctatctcatcctgcgactaagaatgcctgacctcctgggaatgcggcccagcagatctcagccttatttttcccatcccttattcaagatggagtcactctggttcaaatgcctgcgacattagggtccatcttagtcgctaaagaggcatttatttggtctctcagatcagagtgcacagtcctcacctggtttctacttccttaaaagcaactgcatccaaaaagctatagtgggttcactgtgttgttactatttctcagtgttcagaacagaagggatgctcagaaatgctggttgatgaatagttttcacaactaaaaattaaatgttcacttgtagtaagcaaatacaatcattaagagatactgacatggggtcttcagcaatttgcctgtatctccattcggtttctgtggccccacatttcatagacgcaggaactgatttcaagtctaggttcttgacttgagagattataaatgtcagtcagctttcactctaaggatactcctgaaaaatgtgcattattccagactaatcctgatagagaatgttgagtattcattttagcagccaaaatagtgccattatgtggcagtggcctataccatttacaaatcttggcagcattgaagttttgcaaatgctggagggactgaatttgtagtgatgtgtagaatttacaaatttgcacataaagtttaatatttttatgttccacattgacaaaggtgcacaaactgtcactgagccgtcacctggcctggttccttccctctgccccccaagatatgtgcttacaagtgttcaggttgttcttgacgtgttctcaggtgatgcttgccgacaggaagggcacagaagaactgtatgcaatcaaaatcctgaagaaggatgtggtgattcaggatgatgacgtggagtgcaccatggtagaaaagcgagtcttggccctgcttgacaaacccccgttcttgacgcagctgcactcctgcttccagacagtggtaaggaccctgggaatccctgcgatgcagtacccagctctcagagctacgcctcagcccaaagcttcttagcatccttgttcctttggagaaggctggagaaaggtgtgttgtgatgtcaagcagaggtgactggggaccacctcccacctctctcactggtagatttggggcatgccttctctgtgatgtcctctgcttggcattcatgccatttaattcggcaaacatttctttttctttttctttctttctttcttttttttttttttttttgagacaggatctcactctctcgcccaggctagagtgcagtggcacagtcacggcccactgcagtctcaagtagttgagaccacagatgtaccccaccacactcagctaatttttgtatttttagtagagacgggggtttcaccatgtttcccaggctggtcttaaactcctgagctcaaacgatccccctacgttggcctcctaaagtgctgggactacaggtgtgagccactgtgcctggccttaattcagcaaacatttccatgaaaggttttcttcatgcctggtactgtgctcagactttgggatacaaaaacaaacaaacaaaaaaactcacagtcttggctttttttttttgagacggagtcactctctcttccccaggctggagtgcaatggtgcgatctctgctcaatgcaacctccacctcccaggctcaagggattctcctgcctcagcctctcgagtagctgggattacaggccgctgccaccacgcccggctaatttttgtatttttagtagagatggggtttcaccatgttggccaggccggtcttgaacttctgacctcaggtgatccacccgcctcggcctcccaaagtgctgggattacaggcatgagccaccgcacctggccacagtcttggctttttaagaccactggttccactgccaaacatggcattggagcataaggagacttgattttgtaaaagagcatgttcttgttcaatgccacacaacagggactggcaaactgtggcctattctctatggcttgtgagtttaggaaaggtcacaacaaggaaatccaaagagtcatatatcgtgacacgtgaaaattaggtcaaattttaaatttcagcatccataaacagctgttttgggacatcaccacactccttcgtgtacctgtcatctacagctgcttttgcaccatgaaggcagagttgagttgctgcaagagacactcacagcctaaaatattaatacatactgtctggccctttgtggaaaaagtttgctgagctctgtcgtaaagtaaaactaaacagaggacaaaaaaggacattccaaagcactaatcagtccgttgcagggcttgcaagtggcctacaagaaacagacatggccgggcgcggtggctcacgcctgtaatcccagcactgtgggaggccaaggcgggcagatcacgagatcaggagatcgagaccatcctggctaacacggtgaaaccccgtctctactaaatatacaaaaaaaaaaaaaaaaattagccgggcgtggtggcgggcgcctgtagtcccagctactcgggaggctgaggcaggagaatggcgtgaacccgggaggtggagcttgcagtgagccgagatggcgccactgcactccagcctgggcaacagagcaagactctgtcttaaaaagaaaaaaaagaaacatagatgtttagatgccaccatagtgagacgttgccaaagctggtctttccactcctcagaggctgcccatttaaaatatgactccataatcagtagctgtaattgatgcgattattactattttcaactgcccattgatcagagattgactttctgtcttatgcctctttgaaaactcttgggaggaacctctcagtgcttttgtgttttagaatctcaaaatggctttgcagccacccggagcctctgggtgtgtagcagtggccgcggagtcaggcgccggccactacgtgtcagcctagcgctggcggcacgttgagcttcctgctcccagccgttcccactgactctgaatcaagtcacgccagggagagatgagagcagcatgctcggaagagacaaccacagctctgaatcccagcccagagcctgtaaccctggttaccctgattaagctctggaaagctacaaaacaaagaaatgaagatgaaattaaagttcataacaggaaagctagagactggggctcccagggttgcttcctggctattagcaccagcttcatcatttttttctccctgtgcagcactttaatgtttaatatcctctgtgaaatggggatgttttctagcagagagcagaggtcattatttcactgttaaacccctccatcttcctatctgtcccagcataatgtcctcaggaatatgcagatttatttgggtctatgatacatgcccatcatggggccaacacttagcctaccagtgacagagaaaatagaaaaacagtgtttgggcatattacagatgcaaaagaacatttgattagcatctccatctagagtcccctgtcccatgtccagtaaatatattgagcatgtgtaatcctaagcctgagagatgtgttttcaggagtatccatttaaacacgatactacattagtatggcacgcctcccagacactgcaaaccagcctttaaacatttggaccatggagaagcactagttaaaatgaaataattgccttatgtggattcctcacaccatcccttacttagaaatttattatatgtataggaagatagggaagaatgttcaaggccgttactataatagcatatgtaacaggaaggcacgttgatggagagccattatttcagggttatgtaatgactttatacttcccaaggccctcatgcagtagggtttattacttattctttctttggaaaaaaatgtgaaagagctctaaactgagcacatctgcccatgcagtccccatttaactaatgagaaagcaaaacacaacctgtgaagagcaaaggaagccacttggctggggaggagccctgctcatgtgttgaaccttggtctgcaggatcggctgtacttcgtcatggaatatgtcaacggtggggacctcatgtaccacattcagcaagtaggaaaatttaaggaaccacaagcagtgtgagtattattttttaagtcctttaatttgaacaaccaagtcctaccaactggaaacttccttttttcccccccgcttgagattgggggtctcactctgtcactcaggctttgcctcccaggctcgggtgattctcccacctcagcctcctgagtagctgggactacaggcacacaccaccatgcctggctaattttctgtttttggtagagatggggtttcaccatcttgcccaggctggtcccgaactcctgagctcaagctgtctgcccacctcggcctcccaaagtgcggggattacaggcgtgagtgagccaccatgcccagccccaactgggaacttctgctgggtgaaatgggaaagtgggattctgcccagttttaggttgaatgttataaacctaaacatgggaggcggagggcagatatactggtaggatccatctaagatggttcctaaggagcagtttattctatttccagtatttccaataaactggagatgttgccatatcccatcatcacccaggtccacccttgttgatggagttattcttatctgttgaacaaatggttatcacacacctgctctgcaccaggcactggggttgcgaaaggaacgaggtgctccctttccagagggagtttacactccaccctggaggtggagaagtcacctaacaattaatagtgcgttgctgtaactttagagacttgcgcaggataccaggataacacgtaagcccctaaaaatcggggagagggaagtgcaaccccacgaaatgaccggctcagaggtgggggaagagccttccaggaagagatgtgaacagaggcagaagcaagtccagggaagcagccttgcagctcagcaggtgtgggagatgctgtgagattatttgaggggcgggggaaggggggaacgtggtaggtggggctctgggtgaagagcctggtaaggagcctggctgtggaggagggaagagggaaggcactgcagtggggcttgcaccatcagattcagtttttgcagagctctctgggggaagaaggaagcatgaaaggaaatggtagaggctggtgcaggcgctggtgagaccctttatagataagaaggaatggagctgtagttagggctagaccttggagccaaagaggaataagtgtctttgaaaaacaccctggaggaagaaaagcagaacttattgactatggaggagagaagagataaacctcttccagtgagaccccatttcaggcttgggtcggggcagccaccaaggaggaggtggtttgaggggggagattcatgagctcagttaagaacgttttattggaacgcacctgcatgatgggatgcgggagtcggcagcacaggaggaagacgtgggctccaggtgaagatgagagattcatctgaggggtgtggggagctggaactttggtgctggaaaacatcatctcacctctcaggggccaggaagtctcaggaaacaccagtggagcaagcctaaacaaagggcgagtttagttccgcagtgaggaaacctcgggggcatgtaccctgatgaatgaagtcagcacctgttaataggattctggctgctgtgccatctaagagacacattggaagaatttttggcctgcgagggattatgcaccctagggaagattaactgaaggcagaatagggaaatctttggttgcaagctttaaaagtgtgaagggggatttttctgcctttattgattgttccttttcagttttcagaaatgcctgtccttttcttctgtcttatgttgtagttataaagccttaaaatactcagattgtaaaataaagcttggtcacacaggactgtaaagagcagatagcagagtcaccctatgttataaagtaacataaaggtgtctggtccaatatcctttcattatattatttgtgttgcagaaaagtttagaaaagcatgaaaaataatgtaaagatcacctgtagtaatcccatctcttcaccctccccctttctgtactcttctagccttcagaggtggcccctcgttaagggtttggtcttgatcattagagattttttttcctctctgctcgtgtagacacgtgtgcttattttgagcctcctgcatgtgatatttccacaggcacagtcttgtggcttcttcgacttcaaagactcctgaatgctatgcagatttttaaatattcgcctccttttaatctgagtttcagctattaatgtattaacaattttgaagtgatggtagttactgctttttattatgaattatttaaaagagtaaactcagatatgaatctctccaacactcgcaaggaatgaaaacactagctaaagagttcatcacccactatactttgccttccagggagtaattgtattgtattttcaaacaccagtgtattctgccagtgaataggaaaatggaaattttctttacgccatactcctgatatagaatagtctaactggtatccactctttaaatgattgtatgagaaattactctgcaggcaataagctacttgtccaccttccccataagagaataagaagccggtttcattggttttattagctgtctcattcacggataagctggaggacgaagtgatggagggaggaccgggggttggaagaacacgatgctggtctctgagagcctctgggtctgacattcttttctctctttgatgcttgaatttgagaatgtaaagtatacaggcatctaaggaagcaagtgagaaacctgaagcccgttttcttttgcagattctatgcggcagagatttccatcggattgttctttcttcataaaagaggaatcatttataggtgtgtattgaagccctcctaccagcagctcagcagagaggttagctgggcctctgtgggcatgtcattctggaatggtgacttaagacacagagttgataactccccaggaggaacagagacctgctgggacccaccttcctcctcaccctggaggcaaatcagagccaccttctgatttctagaccgcaaagactttatatcttgtttctactttttccacaagaaaacacatttttctctccattgacagctccttccactgccttttctttggaatggaggtcagggagcaatggaaactgaattcctgttatagatgttcagcagaagaagaacacagggaactggggagaggcaaggaaaaaaatctattgaattaaattctgcctgttagtagctgtgctgaaagtctggtgccaaagaaggaagaatttcttccagtattaattgaagcataattagaaggatatatggcacaggcagaatggaagggacatgtgtatgacccagtgaagtggttctaaacccgtgattttgcaaacctggtcatgtgtcagaccccctgtgtgggacatgaataaatcaaatgattgagactttcccagacgtgctcaattggaatctctagagtcacagacataggcaagattgagaatcactagtccagtcgtttagtaatccattcagtatgcatttaagcacctgctgtagcctaggcacaatattagtctctgaagatatcaacacacattgacttctgatactacagtccagggacttatagttaatattgccattgagctgacaggtattcagatatccttctatttcaccagttccaaagcaaaccatgttatgtcatgggaaggactctgatgttaacccggttccttgcagggatctgaagttagataacgtcatgttggattcagaaggacatatcaaaattgctgactttgggatgtgcaaggaacacatgatggatggagtcacgaccaggaccttctgtgggactccagattatatcgccccagaggtaggaaccccagtgatcgttttctcaaccaggactcccaaactgtaaacgcagccctctcatgggttatagggtcactggcgaatcatgaagtcagtgcatggtcacagccactaaatggactaaactggacaaaacagactaaaatagaggaaataggagagcccattgcacatagtaaggttgtgtcttgcttcctggaactgttgtttgctccatgtgagccagttgcttgggaaaatgtatttgttacatggtcatggtcaaaatcatttaagaaacactgttggctgggcgcggtggctcacgcctgtaatcccagcactttgggagcccgaggtgggtggatcataaggtcaggagttcaagaccagcctggccaacgtggtgaaaccccatctctactaaaaatacaaaaagccagggatggtggtgcacacctgtaatacctagctactcaggaggctgaggcaggagaatctcttgaacccaggaggcagaggttgcagtgagctgagatcatgccattgcactccagcctgggtgacagcaagactctgtccccccaaaaaaagaaatactgttgagtggagggaattacttgtgaaaatactctgcctggaaggcggggtgagacgggggttgcagtgatggtgtattagcagcatcgcggtgatgactgttctaaactgcatgttgtctggtctaggaagaatgtgtcagtgtggttctaagcaaaatggttccaggacttgtatcttgacagcagcggctgtgctgctctgcttttgttataacacttacagaggattttttttcctgttttatgaaacatcccacatgccaatgatagaatgggttgtcactgtagtcactgtagagccaactttccatccacacacagtcctatggatgccacagttttttcccatctgtacccagcatggtggagaccaatggatccaaagctgagctggcttcagctcttcacagagccctcagatgagctgttggcagccggtctcacatttattcaacagattaccccatgcatttatctcagagacagtagggatagtgaaaaaggcacccacaagctcagaagtcagacccatgtgagcttcaatctggaatctgttatttacagactgtgggaactcgggtgagttacttaacgtctctgaaccccgtttcttcagcggcaccttagggataatatcctccttgtagaattgctgtgtggactgaagtgcctaatacaacattttgcatctagtagaccctccatagtcattattccaaaagggaagctgctttttattcctttgtgaagaccttgtagttttatgatatttcaagacagcgtggacacatagacttcatttagaaacttaaattctgaatcgcatggccagaggtgatatgtgatcttgctgcataacttactgggattttcccccaaaagaactccctcattagtacctacagacatgaggtgaaattaaatagtcttatttttcaaatatgaggaatagtcagggtactgtcagaaatacaatctcttgatgtagtatttattctgaagcctgttactaaatgacaggtattaagcaggctgtgattatgagccattcagccttcattgaacaattcagcagatgatgtaaaagcttagtgatggggaatggcagcttttttaggaataaaggtggcattgaacctcatctctattaagaccaggtctctcctgttccgacaaatagctccttgtgttcagtaacacctcagctatctaataacaccaggaacaacagtgtccagtagagacaaaattttccatatcattaaggtttgtccatttgagtgtcttgtctttttttgttgttgcggttcggtatcattcacggtatgagttcctgttgccactgtaacagataaccacaaactcagcagtttaaaataactcagatttattatcatgtggttccggagatcagaagtccaaaatcagcctcactggactaaagtcaagctgtgggcagggctggtttcttctggaagctttaggggagaacctgttgccatccatgccttttccaacatcaagaggccaccacctgcattccttggttcgtggtgtcttcttccctcccccatgcaacgtagcatcttccaatctctctgtcttttccaactacaaccctccagcctccctcttctcctacaaggatctttgggattatatggggcccacttggataatccaggatcatctccctagctcaagatccttaatttgcctctgcaaaatcctttttaatgcataaaggtaatagattcacaggttccagggataaggatgtggacatctgttggggagaggggacttagtctatcacacttgttatatgttggagaacctcctcactgtcctcaacagggacacctaaacacacttctgtcatgtcttggtaacttcgggcctcttcatacacagagaatactctgttcttgctctagatactttcacatctgaagccttcattcccctccttacatctactgtacaagcaataatagaggaagtgaccaccttctattgtctaccgtgtgccaggcacatgataaactttctcttggctgggcacagtggctcactcctacaatcccagtgctttgggaggccaaggcaggtggatcaattgaggtggaagttcaagaccagcctggccaacatagtgaaaccccatctctactaaaaaatacaaaaattagccgggtgtggtggcaggtgcctgtaatcccagctgctcaggatgctgaggcaggagaatcgcttgaacctgggaggcagagattgcagtgagctaagatcgtgccactgcactccagcctgggcaacggagtgagacaccgtctcaaaaataaataaataaataaatacaataaaccttctctcatttaatcctcatgacaagccccacagggaggtagcatcagatctgtgtttcagatgaagtgacagaggtggttagtaacgtgtctaaggccacgttactgagaaatgccagaattaggctttgatcccaagcccaggtcacctccaaacctttgcactgctcactacactaaactgctcgaaacttgagcgactcacgtatccagacagcactctgcgtgcttactgtgcttaagcatggtgccacgagggatacaaaaagacatcagatggcccttgccctccaagtgctttcagtttataagaagtgacatcatactgaccagcaggaatgaaaatctatatgtggattccagtcagctttcgttgaaaacatcaggcaccactgctttggaaaatcaccttaaggttgtttcaccttttttgttgccttgctttttttttttttttttttttttttttgagacagagcctcactctgttgcccaggctggagtgccacagctcactgcagcctcaacttcctgggctcaggggatcctcctgcctcagtccataggttgctggtagtacaggtgtgtgccaccacctgtgcctagcctgttccagcttttgctagcattttttcctcataagtgttcagtaatttggcatatttggccacacgaatacttacagtatagagaaagatcagataggttcaaggtttcaaaatgtgtggaaaggttaaaataatatttcgtgtggaaaattcaaaatgtgtggaaaggttaaaatagtatttgtcctctgtgcaaatactcctgtcaggcagagacaaaatcattatcttgcatggcattctccttaataggcaaagcggaggcttaagtatttatggctatttgttcaaaaaccttgaaatcgattaataccttagcgtctccttaggcagcgaagccgagctgaggcaaaaaatgtcactaacagatgagagtttgaagttgaaatggacacccacagaaggagcactcatcagaaaatgattcctaaagctgacacagagggtcctctttgctttgacatagaaagaattcttcaaggtcaatgagagtccttgagcaggccaagcaaaggcttcatttggatttaatccatctctgaaacttagttattctgggcgtgtgtgatccagtcacaagtcaagtagattccagcagccaagaatcaggctccagacactagcattgcgcactcttgcctggaagaaagagaagcaggaagagtgtctgcttctggcctgtgtcccgagaaccccctactgcagtgagagcaaagcttttcattttatttattttatataattttgttctaagaactttatttttttaaagacagagtttcgctctgtcgtccaggctggagtgcagtagcaatcatagctccatgcagtctcaatctcctgggctcaagtgatccttccacctcaacctcttgggtaactgggactacaggcatgtgccaccacgcctgctaattttaaaaaaattttgtagggatgggggtctcgctgtgttgcccagactggactcaatttcctgggctcaggcagtcctcctgccttggcctcccaaagcactagaattacaggcctgagccactgtgcccggccctgaagtgaagctttttcaagtgtgccatgtagagtcttcctcacagcatcgctatggcgggggctacgttagaccacacacaaaggacatcacccgtgatacactgacttctctgcaccaacctccctgagcacttctgacttgccacatgttagtatgagtagaagttcagtgacttgcccaaggtcacatagctggtaagagcaaaggtgggatttggatccgagatgttctgaccggagcccgtacgttctttttacctattgcattgtctccatagatatgggagaaaaagcaggtgaaagtgagcactcagtttgggccacgttttcttggccactcacttatctcaacgtgaatcagggacctgagtcatgatcagagatgcagtgaatgacgcagaattgcattccagctgttatccccagggagatcccttagaaaccaagggtgatccagccacacgcaagcccctccccagcacgtgggcatcgatctgttggcatattcagggtgccccccgagtgctgggcactgttccaggccggggggtgccgggccagaaagaggagcccagaggagagctgggaggagggccttggggctggaggcagctggaaatcagtgactgcagcccaggaggactgtggattttgagaggtggacagggcagtattctcagcagtaacagatggtgcatccaacacggttgaaatttccagggaagaagcttgcagacgtggttgcctgacctgcagccagctgcctatcagcagatgggcatactcctgggaggactgggggcttcatgggtccagagagctgaagagccattctggggtcacagcttctgcgttcccgccctacaggaatgccagcccactgatgcctgggacagcagccagattcctgtatttttatgtaaaatacacctaattgttccaagttggccctaacatatgttttttaacatgtgtatacaagtgaaattcagccaatgggctatcacctatgacctgtcttcttgaggtcaagagtcctattaatatttggggggagcatattaaagatgggaggaataaagaccaaaggatgtccatagaggtggaagcactagacagccgtctcgttcttggaccccaaggagggcaaatgttcatgaagtcagggtggccagggactgaggaggtccagcagacgggagtgggatgggcagaagatctagccactgggacttgatgatccctgagagagcagtgttggtaatgatgccgggatggggtgagcgtgagcatcagcagcgcagcaggaggaccttcctttgaggacatctatggtaaatggaaggaaagaaagtggacagtcactcccaggaaggcaggctgaaggaagcatcatttacgtggcagaaacttgagccaaagtttctaagccaaaggggaaatgccggagagagagagggagggcgggaaggagggagggagaaagaaggaatggggcacccgtggtaaggatgcccttccctctcagcttcaggaggaaggggaggggcacacaggagacctcacggtggcaggaaagctgaaaccccctccctggccagtctgcatcttcagagggtgacaccaggacgggcgggtattaggtatcttggctctgaattggaaccccctccctggccagtctgcatcttcagagggtgacaccaggacaggcgggtattaggtatcttggctctgaattggaaccccctccctggccagtctgcatcttcagagggtgacaccaggacgggcgggtattaggtatcttggctctgaattgggtatcttggagaagccaaagccttcacaggggccccaagaccctttagcacctgcctccccgccccattccctccctgacctcctccccctgccctccacccctccggagctctctagacccattgcactagctccctttccactctccaatttgccagacctctccatcctcaggccagttcctcttctttttccttccacccagcatgtcccaccccaggcatctgctcagagatcaccttggggaggccccctgccctggtgaccctatttgaacctgcaaacctccagtcccatccaggactgctgactcctgtccctgctgtttttcatggcactcatcccccttggagggacaaagatgtactcctgaactgatttttcagtctatctcaccaagctccaccacgggcagaatttcatctggtgttggctgctgtgcccctaccccagggtctggagccgtgcctggcactcagtgtgtacttggcatgggtgcctgcacgctgcgctcctggatgtggccacctaggaatctgcaggggagacaccgcaggaggacagagatgaagccttggagactgagaggggtggaactctttagccaggtgattggaagggtgacttccaaggccatcacaggtgttgggctgatggtatgtgacagtgcagagaagggccacaccacctcatgtcatcggctgaagagatccagcaggttgggggacctgagtgaaggtcaatgggacatcatcccaggtcccccagacagccccagctgaccccagagacttctcctggcctctggggaaaggattgtagagagggatagaaaataagagtatctaaaggttcaaagagaaaataactcatgtggtatatacatgcagccgggcagtcaggcagtaaattagcactcaccaccaagaagaaagggggagaatgagatacagggagagaaaagccaatcagcaccagcaatggctcctctgagatcagccgcttctgaaccatgggccccgcaccagcccagcatgggcaggagcaaagaaaagcacttgatgaaagaaacagaatgataaaccaaagggcggctttctttctatcaaaggccaatttccctctatggagggtcatggtccagtgactccagcgttgcaagagagaaaatgaagccgccgctttccctcaaagaaatatttaaagagccaaagccaggctttcctttggggtcttctttaagttgtgcgattctcagatcttttctaggaattatgttggttttattatctcatatattgtattgtctgcctgcagctctttaactgtctcataattctccccgccttggagtttaatcagtttagcctcttctctagagcactgggcaccttctgcgatattgtggtctatgaaacaaatgtggcccgctcctttcttctgagcctccccacttccaatcctccctccagaagtaaccagctcctggtggattcgctgccccttcgcaaatgcctgctacatcccagaccagggctgagcaccttgtttattttgtttaatcctaagtcaattctaattcctggatggtgaaactgaggcacagagatttgttaattttccccacctccccagttcaatgcagacttggttttgaacacaggactgagcagcttttccctgcggtgactgttaccctgggaggaagggcctgcagacatcagctccaatgctacccaagcaacatgtcactccacatgtgccagtaagctgctctcacaggcctgttattggctttcagagctcagataatgctctgttagatttttactcctggtatttggtggcatgctttaattagccctttatttagggatttgcttaaatcctgtaaaagtgggtcagagatttctgagcttatttcgcctctttctttgtaacattgcccaggcgatggcaggatggaggtgggtatcatgagagattactaacatttgttcatttcttgctatgcgccacgcacttaacgcctgttatcacatttaattcttacaatagccctctaaggtaagtggtattattcatgctttacaaacactgtaaaggagacttggagaggagacgggacctgctcagggctcacagatggcacatggcaggggcagaatgctggcccgccagcctcagagcacaggctggcgccctgatgccatccacggccagttgccacctcagtgtatcacttattgccctgtctccaaatcatatctgtagagatccactagactttgagacttcttggttctggaaaatcttttaatccagctaataaagctcttacgacacaagttattcctaactcacacttcattcctttaccatacaagcagttattttgttctgatgcataattaacattttgcacagcttctctgctgaccccagaggaggcctgagatgagcagggtcctataggtgggtgctgagctgggactcctgcccagcttttccctagcacctcctatgcccctgccaccctcagagggagagaccagggacaagggctgctgcttccttcctcccaggaagcatggctagggggggtctcaggaaacttacaatcatggcggaaggggaagcaggcacatcttccatagccagagcaagagagagagcagggaggtgctacacactttcaaacaaccagatctcatgagaactctgccacgagaatagcactaggcggatgatgctaaaccattcatgagaaactgctcccatgagccagtcacctcccaccaggccccacctccagcactggggattacatttcaacatgaaatgtgggtagggacacagatccaaactgtattataaactctggctacagtactgctattttaagaacttggggtgacatctgtataatagggtataatcacagcatcttcctgaaagcccaactttgagggctcagtgagtctggccataatgacttagcctgcctcagagggagcactccggaaagccttgtccattatttggcagttgtttcaattatctattgatgtgtaatcgccccagaacataatggcttaaaacaataatcacgttgggctgggcgtggtggctcacacgcgtaatcccagcactttgggaggccggggtgggaggatcacctgaggccaggagttcgagaccagcctggccaacatggtgaaaccccatctccactaaaaatacaaaaaattagctgggtgtggtggtgggcacctgtgtagtcccagctactcaggaggttgaggcaggagggtcacttgaacctgggaggtgggggctgtggtgagccaagatcatgccagtgctctccagcctgggcaacagcaagactctgtcaccaaataaataaagttaatgctgcgattcttggagccagggcctccatcaggacccggcaggtggactccttgctgctgcagggacatccctaccatggctctgctggggctggagggcccaaggtatcttccagctattggccaacgccacatgggttctcctctacctggtccttctttccatgcagccacttgtcactgagcttcttgacatggtgctggctactaaaaggccaaaaacagaagccacaggctgctgaagtctatacctggaactgaactgtgttacttccaacacgttctgcaggtcaaagacagtgaggaccaggcaagagggcccctgccttgtgttttagagcagagctgagcaaactttctctgccagggactagataaaaaataggcttttcctaaatcttaattttagatttttaccaagaggcaaaattgagcaactgttcttgccaaaatcattttacatttaaaaatgtaaaaagcatgcttagctcacaggctgtacaaaaactggatttggcctacaggctatggtttgttaagccctaccttagtgggctctcctctccccaccagtccccaggctgggctctccttatagggttagagtctgcagggccaatgcccactcacagcctgctctccgaccccttttagacaacaacctgggtactcagagcctggaattcccttccagggcctcttgccaagatccatccttcctgtgaacaccgccctgctggcgtatgcactcctgtggccagtggaggagtcagtggatggctgttttcaggggcagtgggacgcagttagacatgcaggttggggtgctatgatggaaagggcctgggaagagaagtggggtggcccatgtcaatagtacattcttaggcctccacatactggagtggaatctcaggggtccatgaattcttaagtcaaacttgtccttccaggttcttgggaaatgtaaaggactgaattgcatccccacgcccccaccccacaaatccgtgtgctaaagccctaatctccagtgtgactgttctgtagagataaggccttgaagaaggtaattaggggagaatgaactcatcaaggtggcgctctgatctgataggattagtgttcttacggggaggggaagaggccacaggagggtgcatatggaataaaagccacgtcaggacacagcgagaaggaggcagccagcacggcaccaagagaggcctcaccagaagcccacctgctggcaccttcatcctggacttccagcctccagacccaagagaaatttctgttgtttaagccacccagtctgtggtgttttataagggtagctcaagccaaccaatacaggaaggtacttgtgtcaaggggtgggaaagagcatactgtatttaaccgtctgttggcttgatttgtaatactcctatttagataaaggctgtgtgagtcttagttattcttgtcccggctccctcaccccacatgttagagatggcctcatcctaggtcaatagggagttgtgggttagggccaagtagattatgttataaagcgagatgtattttatatattcatatcttttttcatatatatgttcatatatatatgtatgtgtatgtattcatacaatcaacatcgttgtcactcttatcaagcagaacaggaaggaggaataaaggccccagagggcaggggcaccatctcagatgtctttgtcccattcacagctccttcttacacagagcgggcaccatgtgcgacagtaaagcaagagccaggatgaatcctggccccatctgccacctccccactgtgcgtgtgactctggtcacctcacttgagcttgctgtgcctcgacttctccagtggtaaacgagggtacgacctagcacggtgctggcttaaagactgtgctcaggggtggctctgattcacatttgatttatagtcaatattacattcttagtgcatctcaccattaaggaggttcctgaaaaactcggtgggggaaaagagaggatctgaagaggtgtttgatttctttgacgtaacaagaaattaaagaagtttgctgggcatggcgctggagaggtccggtgggccaagtcgattagatgatgtggggtgggccatgtcaatattacattcttaggcctccacatactggagtggaatctcaggggtccatgaattcttaagtcaaacttggccttccaggtccttgggaaatgctaaggacggaattgcacctgtcagatcagggccccaccttgatgagttcattctcccctaattacctccctcaaggccttacctctacagaacagtcacactgggggttagggcttcagcacacggatttggcggcgggggatgcaattccaaggtcgggtgacccaactcaattagataatgtttttctagacccagtcgctccacagtcaccttcccgatttctgccaggatcagctagccttaccgaagagctaaaaagagattcatcccaaacaagagcttccttggaagcattccatgaagacttgaaacggtgctgcctcccaccacctgacccagtattgtcagtgcctcctctgaggatcgcagaaaatcgcaccccacgcccccccagtgcacattccagacttggagaagcgcggcatggggtggcggtggggagaacacctttctgccagatcaaaagcccagcactttattcagagttttatttatggctccttcagaaggttagtccagtcacgcctccttaataaccgcctcatcacacatgattcaggtgtcctggggccacttcacgctcctggcttcctggcccaaagcccaggagaccgctgaaccccactgcctggcattatttgcgggcgagacaccactggtgaagtgtttgtcttttcttatggcttattttattgaaggttgttcttttagtcaaacaccttttcagttctttgtgtttgctgagcacccagggctgtctcacccagccttgaattgtttccaggcaccttgcaagccagtattgtacagttcttttctgcacagaaaaagtacagacttctggtttccagtccagcatgttaggagcttagacgtcatcgttccatcctgacaagtgaaaagctggactggaaaatcaacaattcttcctagagccattggcgcctcccacgtgggagacctgggttcatttcctgaccagtgcaccagcattggtggttgagtggtagaattctcgcctccctagagccattggaaaaatgaggtaacagggcaaaccactgtccccaaaattagacagacaggcagatacagataattacaacttaccagaacagaaacctccctggctactagtgctggggtgcaaaaacctgatccgtaatcggcaaattgctggaggctaagtgtggacaagtctgagaatcagtcacgggggctccacgcgttttggagttttccctcaggaagcgctgccgggtcctcacagtgaatgctggagaaaaatcgcctcatgcttctggcagggagaggagaaaagtaataaccattgtgaaatatgccagagcatcccgttcttcttaacaagggcttccctcaggagacgctaatgtgagcttaatctcctggggttttatcagaccctaacctacctagaagaagggacatccccgattccaatcccttccacccatcctctcccacccaagaggagaggggggagaccaagaagcacttgtgaaggtcacaatccacaggcacaggctccccacaagacagagacctcatcgtcggaccgtagcacacttcccctctccacacctcaccaccacatcactaaaggttcatgtactacagttcctttcacccagtgtgccatgtccagccctcaagaaaacaattacagcacactaaatggcaaaaaaaaaagaaagcaatttgaagagatgaagcaagcatcagatgcagactcaaatgtggcaaggatgttggaatgataaccaggagttttgttttttggtttttgggtttttttttgttttggagatggagtcttgctctgtcacccaggctggagtccagtagcatgatctcagctcactgcaacctccgcctcctgggttcaagcgagtctccggcctcagcttcccaagtagctgggattacaggcatgagccaccatgcccagctaattttttgtatttttagtagagacagggtttcaccatgttgcccaggctggtcttgaactcctgacctcaagtgttccgcctgcctcagtctcccagagtgctgggattacaggcgtgagccaccgtgcctggccataaccaggaatttttttaaactatgattaatttgctaagggctttagtggaaaaaagtagacagcatgcaagaacagatgggcagtgttaagcagagagaaattccaagaaagaaaagatgctagagatcggaaatactggagcagaaatgaagaatgcctttgatgggctcatctgtagactggacacagctgagtctggggtgactgagcctgaggatatggcagtaaaaacttccaaaacggaaaagcaaagactgaaaaaaaaaaaaaaatggaacagactatccaagaactgtgggacagctacaaaagatatatgccctgggaacactggaaggagacgtaagagagaaagaaacaaggaatgtttgaagcaattgggacagagaatgtcccctgaattaatgtcagacaccaaatcacagatccaggaagctcaaatgacacaaagtaggacaaatgctcaaacaaaacaaaaagctaggcatatcatattcaaactgcagaaaatcaaagaattctgagggaagcccagagcggggaaagcaacacgttacctaaagaagggcaaagacagtagagtgaaatatttaaagctttgggaggaaaaaaaaaaaaaaaaaaacgaacctagaattgtgtaccctgcaaaattgtccttcaaaagggaaggagaaataaagactttctcagacaaaaacaaaggaaatgtgttgccagtagaccagcctggcaagaaatgttaaaagaattttttttgttttttgggtttttcttgagatgtagtcttgctctgtcccccaggctggagtgcagtggcgccatctcggctcactgcaagctccgcctcccaggttcataccattctcctgcctcagcctctcgagtagctgggactacaggtgcccaccaccatgcctggctaatgtttttgtatttttagtaaagacagggtttcactgtgttagccaggatggtctcgatctcctgacctcgtgatccacccgcatcagccttccaaagtgctgggattacaggcgtgagccactgcgcccggccaaaagaagttctttagagagaaggaaagtgacataggtcagaaacttggatctccatggggcaaggaagggcaggctttgcagatgctgccaccacccatagccccctgcaccagccgtgggcagccccactgtgttcttcaacatgaggccgcatctctttcaagctgtttgcagactacattccaaaaacagcagaaaatttttgtgctctgagcactggagagaaatgatttggttataagggctctttgctttcacagaatcatgccagggtttgtgtgtcagagtggttacttcacacaccatcaaatttccaagaaaatttactggtatcaagaaagaaatttgatctacgggaagaaatttgatggtgagcacttcatcctgaagcatacaggtcctggcatcttgtccatggcaaatgttagacacaatacagatggtccccagtttctcatctgcactgccaaggctgagtggttgaatggcagagtggcatgcatgtggtctttggcaaggtgaagagaatatcgtggaaaccatggagcactttgggtccaagaatgccaaggccagcaagaagctcatcattgctgactgtggacgactcttaataaatttgactcatgttctatcttaaccaccagacattccttccttagctcaggagagcacccctccaccccattcgctcgcagtagcctctcatctttgtgctcttgctgcagttccttgggttccatattttccttattcccttccatgcctagctgaattgcagagttaagtttatgattatgaaataaaaactaacaagagcatcagagaaggtataggtgaaagtaaaatacttttagtattcttgatctaacatgagtttttttcaaaataataacatattctagtgtgtgtgcatatcctatgtataagtgaaatgaacgagagcagtgatagaagggataagagggaagaattaggattattttgttatcatagctactttcactatgcatgaagtgttacagtgttatttgaaagtagacttgggctgggcgtggtggctcatgcctgtaatcctagcactttgggaggccgaggcgggcggattacaaggtcaggagattgagaccatcctggctaacaaggtgaaaccccatctctaataaaaatacaaaaaaaattagccgggcgtggtggcgggcacctgtagtcccaggtactcgggaggctgaggcaggagaatggcgtgaacccgggaggcagagcttgcagtgagccaagatggcgccactgcactccagcctgggtgacagagcgagactccgtctcaaaaaaaaaaaaagaaagtagacttggtttcgttgtaaatatatattgcatattctagggcaaccactaagaaaaggaaaaaaggaagtcactgatatgctaagaaaagaaacaatggaatcatatgaaatgctcagctaaacccgcaagaggcagaaaaagagtgggagacaaaaaaaaaaaaatggacaagggccacaaatagaagacaataacaaatatagcagtgattaatccagttatatcacaaataactttcaaagtcattggtctaaatgcagcaattagaagattgccagactagatcaaaaaacaagacttaactctatgcaagaaatccactttaagtataaagacatgtagattaaaagtaagtggatataaaagatatatcatgctaatactaatcaaagaaattaggagtcactatattaattgcagctagagcagacctcagagcaaggagagttatcatggaagggcattacataatgataaaggggtcaagtctccaagaaaacatagcagttgttaatgtgtgcgtctgacagcagagcattgaaatacatacggccaaacatgatagaactgcaggtagaaatacatgaatccactattttatttgaaggcttcagtgcccctctatcagaaatagacatatcccgcaaggagagaatcagtagggacggagttgaactcagcaatactgtcctgtagactctacttcatccaacaacagcagaataacatacattcttcacaagctcacatagaacattcaccaatatagaccacattctgtgctgtaaaacacaccttaacaaactgaaaataatagaaaccatgcagtgtcttctctcagaccacaatagacctaaactaaaaatcaataacaaagatagctagaaaattccaaaatacttgaagattaaagaacccttctaaatagtgtgggtctaagaagaaatctaaaaggaaattttaaaatattgttaaataaatgaaaacgtagatacgacttatcaaatgttatacggtgcaattaaagcagggcttaggaaacttatagtattgaattcatatattagaaaagaagaaagatctaaaatcaaccacctaagcttccatcttaggaagctagagaaagaagagcaaattaaatccacagtcagcaaaagaaaataaaaactagagcagaagccaatgaaatagaaaatagaaaacagggaaagtcaacaaacccaaaaggaagttctttgaaaacatcaataaaattgataagcctcaagtcaaattaagaaaaagagagagcacaagttactaataaatgaaagaggacatcactacagatcccatggatgttaaaggatgataaacaaacaccagcatggaaaactacagactaatacctctcatgaacatagatgcaaaaatcctcaacaaaatattagcaagttgaatccaacatgtatagtaggaattagcttctgtttgcagccagtataaacaattgcaaacactgctttcatttgatcctcttctgaccttttttgggaggggtacttaggctgttctgctgtttgcttcccattcttacagggaggtaaaaaagggtggctactctaaatagattttaaagcactttcattggtgtaattactattagagagatcattttctgttttctccaattgtacatagagccacaatttttgtctaaatagaaaatacataggctgggcgcagtggctcacacctgtaatcccaacactttgggaggccgaggtgggcggatcacaaggtcaggagattgagaccatcctggccaacatggtgaaactcagtctctactaaaaatacaaaaattagccgggtgtggtggcgtgtgcctgtggtcctagctactcaggagcctgaggcaggagaatcacttgaactcgggaggcagaggttgcagtgagccaagatcacgccactgcactccagcctggtgacagagcaagactccgtctcaaaaaaaaaaaaagatacatagtttggactctagactctttgtttttaatcttgtggtaattttctttatttttctttacttatttatttggcggtggttgttgttgagatggagtctcgctctgttgcccaggctaaagtgcagtggcacgatcttggctcactgcaacctctacctcccaggttcaagcaattctcatgccccagcctcccgagcagctgggattacaggcacttaccaccacacccggctaatttttggacaggctggtcttgaactcctgacctcaagtaatctgcccacctcggcctcccaaagtgctgggattacaaatgtgagccactgtgcccggccagttttcttttttttttatataatgcactttgtccaaggatttcaaatattgtagtcatttcccatgtgacatagtaagatccttgatcttggatatcgtatcttagcgtatttgtctgttatcccagttagtttggtaatctgtgatacctagcagagtgcccaacccatagaaatgtacagtcagccatactcagtgggagtgagcaaaggagagggccaaggagggtgtcctaataccataagaaaacagagaagcctgaagttttgctgctccagtaaaaaatcaatttaattgcctaaggggagatttttaaaaatctgtttgattcacttctgtaactgattcacttctgatttactatgtctggtacacagtaaattaatatttgctgaaagaacgaatggaaggtttattgtcgcttaagaattttcaggtgccaacaatcatttgagtgtttaacatataccaaaatgtttcctctgtccccctctgagccaagtttagtttatttccttgaataactttcacccacctgcttatttctggtaggccagttcttatttctaatgttaggcagtatggagttatgtatactcagctgcagtaagcacattttaatacacataatgccatttaatccccaccacctgcttgtcaggtgggtgctgaaatcccaagatcacagctgaggaaatggaggctcagagaggctaaccaacttgcccaaagtcacacagctcctggcctccagcagttgggttcggagctctctcacctcattctgcttcccgcttgtattctgagctttggctatgccattggaaaggagtttaattaggaagtatctcgattgagagctgggggtgtttcacttctcccctgctgcggggctttctgtttatgacgctctggtctctgttctgatgctttagaaagaggacacggtcaggagacctgaggcctctctcttcctgaccttgctgttaaccagcccaatgacctcagcaagccactgtgccactttgagcctcaggagcctcttcagaaccctgaaaacaccttttttattttattttaatttgttttagacggagtctcactctcttacccaggccggagtgcagtgcatcatggctccctgcaacctctacctcccgggttcaagcgattctcctgcctcagcctcccaagtagctggaatcacaggcatgtgccaccacgtccagctgatttttgtatttttagtagagacagagtttcaccatgttggccaggctggtcttgaactcctgacctcaagtgatcctatcgccttggcctcccaaagtgctgggattacaggcatgagccactgtgcccagcttgaaaacatttttctaaatcatccctccagacttagcaatccagcaattctaacagcccttttgattttgcactttagaggtaggcagtgtctatggagtggtcttggatcagatccactacttctccaacacaaccttgtgtctgccccgtgcctgaggtcctggtgctgggtacagaagtggatggcccagccccaaccagggagaagtctgggttgagtaggggcagacagtctcagtagacatgacaaaggctccaggagttgtgggtcccacagtagcaagtggaggagacagttatcaaacccaagatcccagctgtcagatcagaacacccagaaaacgttcaggcctgtcttctttctttccaaatggtgctgtttggacgcgtcagacagtgctttgaccatgttacatgtaaagagtgcctctggggtcctgtgttctatccttgggaatggatgatgtttttcaaaacaaatgtaatttttccatcaaaatgtttttgttttttgaaaaagaaaggatattctttgtttccctgaaacagtaaaaggacttgagtgtgttttatgcataaaggccaccgttattttgtaatgacagcttgggaagaggcttttgtggccaggccttttatttaagattgggctctaggggtttgctgtatacatacagcacaaaaatgaagagtgaaatcccagttcaagtgcagccgagaacaggagagtgaatctccacacacgtactttataggtccgtgggttccttcaagaaaaagcctttagagccaagagctcctgagtgaaggaggcatcttggctgttttgatcctgttaagcatttgggccccttttcagcaggactcatgtaaactgggcgagtacccaccatagctgtctagggaaccccactggatcaaggccttcagtatagaaaaagggtcagaagtatggatgccaaagccgatgaccagggttctaatccaagcgttgctgcttgcaagctctgtaacattggacaagctactgtgtctctctgtaccttatttcctcacctttgcaatgggccttatgaggattaggtgagcttcagagctaaagagcctggctctcggcacatgcctactgtggtgatgttggttacagctactgtcaatattgccagtggcatctaaaaccttcctgtgccgtcctcaagctctcccaggctggagatttcagaagttagaaagctcctggagtcccatcctctctgggaggcatttgaatgtgaagccctggtagagagtggaaggctgggtggccttggagtgacatccttccagctgctgcaggcccttggccttgtacaagacaagaagctaccccctggtccctttcatgccctggtcctgtgcccgggctggaagaaagctcattcatatctcacttttacaagacaggcagccatttgtaacatcctgacattcccccaagcagttggctcttgtaagtataataataatgatctaaatgacaaatagcagtaaaattgaatgacagtggccttgttgggggtctgtctttgaagccacagctcaacctcccatgtgcagcagggaaatccgccagctctagcccttcttgccaactctgcctctccttttgtgagtttctccattatgggaaaccagattggcgtcacagccccttgcctggggcttcaggatatcaggcagccctgggcttggctgtaagcccacattggcccacaagtgccagagacacctgctcctatccccataggggacagacaagagagtctcctcatccattccatggtctctgagcctggtcctcagcccaaagctggctccctagaccaatgagagccagagaaccagaatgggccataggagccggtggaattcagagggtctcagccagcactgtccaacaaaagtaaaatacaagccgaaactgcgtttagcagccaagtttttaacaagttggaaaggaaacagatgaagttaatttattaataaaaacatttaatgaaggccaggcatggtggctcacgcctgtaatcccagcgctttgggaggccgaggcaggcagatcacctgagatcaggagttcaagaccatcctggccaacatggtgaaaccccatctctacaaaaatataaaaattagccaggcataatgatgggtgcctataatcccagctactcgggagactgaggcgggagaatcgcttgaacctgggaggcagaggttgcagtgagccgagatcgtgtcatcgtgtcactgcattccggcctggtcgacagagcaagactttgtctatatatatatatatatatatatatatatatatatatccatatatatacatatttgtccatatatatatatttgtctttatatatatatgtctttatatttgtctttatatatatatgtctttatatatatatgtctttatatatatatatatatgagctattttgcattttttatactaagtcttcaaaatatgatgtggatttcacacctacagcacatctcagtttggactagccacatttcatctgctcagaaaccacaagtggccagtggccactgtattggatagtggctctagacagctgaatagggacagtatagccaacatcctaagtcgtgtgtatctgaatgtttatcttccagtggggctctctaacactattttcccttttacagtgaggctttggttaaccagaggtatttattaaccacaactgctcattgagagaaagatatgctttattccaaaaatgaatttgcagcggtgaggttgtgccctatacctgtaactgagatcttcaggacctcccgtgttatctggtacacaacaagccaaaggtgacacgtttctctgggaaaaaatgctctggctagattctaaaccccatcctattgttacaattgaaggcactgcagtgttcagagtgactttgtaatcttggcccagtggctgagcaggcgggctctatgcggctgatgaggatgagtgctgtcacgagaaaaacgagccttggcgcttggcattctgcttttggtaagccttggaggaaggagagcgtgttatcagaaggagtcatgggaatttaatgccttggaaatagaaaatgaagagccagctgggagccaacttgttgtagaacttaaagcaaaaccaatcaggtggccatggcctttaggattcatgaatccttctgaccagaaacagggctcccacacccttgcctgttgatggctttccaattcggacatcagtttccatcacccaagcagagagatgtggttggcaagactgctcagatatttgtagaatataggataggaaacaaagtataacctcctttgttcagccctcactgatcctttacctgatacacacagcaacactgttgcttcagccctgccactgttaaaaacaaactcactttgggaggccaaggcaggtggatcacctgaggtcaggagttcgagaccagtctgggcaacatggcaaaaccctgtctctactaaaaatacaaaaattagctgggcatggtggtgggagtctataattccagctactcaggaggctggggcagaagaattgcttgaacccgggaggcagaggttgcagtgagcagagattgcaccattgcactccagcctgggtaacaaaagcgaaactccttctcaaaaaaaaaaaaaaaaaaatttaatgaaacaccaagtaacataacatacacagatggtggggactggctttaaccaagttaaacatagtttaacatagttacaagagcaaattttattcaagtgcttttgaaatatagttacttaaaacaactgaaatgatgctttccaataaatcatcttaatcctctgggccctttgattaatatttcattaatcccagtatcaatgtatttgaaaatacattgaaaagataaaattatatctttaaaataaatgtgtcagtattcagttccacatattaattgattggctttgagcaagtctttaaacttagagaacctattttctccctataaaatgagaatatacagtaagacctcacttaacattatcgataggttcttggaaactgtgacttcaagtgaaatgatgtataacaaaactaggtttttctccctcatcagcattataaggaaatgatgttatttgaggacctgctgtatgttgttttgcttaaaatcacagtttccaagaacttactgctggtacggagtgaagacggactgtaataacaactctgcatcatcagattacacaagatgtgtgtagtgggtacaacctgcatttggtgcccagaaggtggattttcactcacccaaagagaatttctgttgcccttctacttggtcaggacaggatttgtagaaaagctgagattgtgtgattcacttacatgaaggaggaagtttttagaatggacaactcttgctgccacagcaatccctgaaatctcagtggcttaacacaaccaatatttccttactgctcacacacagtctgatgcaaatcaggcaaccctcctccatcttgcaactgagccatctggaacaggtggcccctagaatcacagtgacaggaggcaaatgggcttttaattgcctcaacccaaaagggcaacatcacttcctctccctgtccattggccagaactagtcatgtggctccaaagcagaggagattatgaaatgtaggggagcacatgggctgtttggggaatactatctgatgctgaaggtttgctcctatcattctaatttattctctgatatggcaatatgatagcctattaagcgtcttcccactgacttgttttgttttgttttgagatgaagtcttactctgttgcccagtctagagtacagtggcacaatctcagctcgctgtaaactctgcctcccattttcctgcctcagcctcctgagtagctgggattacaggtgtgtgccaccggacccagctaatttttgtatttttagtagagacagagtttcaccatgttggccactccggtcccaaactcctgacctcaagtgatccgcccgcctgggccgcccaaagtgctgggattacaagcgtgagccaccatgcccagccatttttttttttttttttgggggggagagattagggtcttgctatgttgcccaagctggtctccaattcctggactcaagtgatcctcttgcctcggcctcccgagctactgggattacaggcatgagccactgtgcctttcccctattcatttttaagtttgctttctggggtaggtttatctttatcattaacctaggttttacaccactggaattgaagtgaaattatccccccactgcaattagtccattttcacactgctataaagaactacctgatactgggtaatttccgaagtaaagaagcttaacaagaagcatgactaggaggtctcaggaaacttacaatcatggcggaaggcagaggggaagtaagcatgtcttaccatggcggagcaggggagagagagagagacaacaaggcgggaagcgccaaacacttttaaaccatcagatcttgtgagaattcactcactatcatggagaacagcaaggggaaatccgcccccatgagccaatcacctccctccaggaccttcccccaacaggtggggattgcaatttgagatgagatttgggtggggacacgatatggtttatggacacaaaccatattgggaggtaagtagtggctttcaggagttggccgagcagttttaatggatttttttcctttgcttaagggtgtaggttaagtgtactaagcatgtgctaagtggagaatggataagcagacttgatactgccactattctcaaggaaatggctttgtttttgttagtttgaaatgagaatccagtgtataaatcagctcttgatcttttagactgacgggctgtggaagggacaactcatttcagttaaaataggcatttccaggctgggcatagtggctgatacctgtaatcccaacacacctatgcaacaaagcaaaatcctgtctctaaaaaaattgttaaaaaattatctgggtgtggtggtgcatgcctgtggtcccagctacttaggaggctgggtgggaggattgcttgagcccaggagttgaggctgcattgagctatgattatgccactgccttccagcctgggcagcagagcaagacactgtctcaaaaaaaaaaaaaaatagtattgccaaatagccagtatgaatcagatcttaattttcctgtgtttaatactttgctttggattgaactgttagagaagtacttcagtagctagctgctgagttacaaatatgttgatttttttcctatgcatttatcctttaacattctagtcccccaggaccatcttgagaacagtgtggcctgctgcacaagcttttctcccttgcaaattttgttggggaaagccacatttcccacctagcatcacagagtgtgtttttctttaattttataatttgcagctctacaaagactgtgttgataggagcaaggtgtgtgagacaataattatgtttgtggaaccttgtcacattttcttagactattattttagagaacagccctaagccaagacattgggtcttgtgatccttttcaaagaaaatcgttgggctcgttaatcctttgattcaagtcttttttaaaatgatattttccattttgactaattgaagatttcccactaagataaatggaagagacttatcatttgatcaaaattatagcagtgcttgatgtttgcctactaccctacagttttcaaacaaaatccatttacattcactcatttaattatccccctggtttttctggataagcagagtttcccatgggtggaatgcttccattcttgggaatactttatatttcctctcagatttatacatttctagttggcacagcttctgccgttcagatgcaggaaatagagaatgccactagagaaacagatggaaagacaagaagcagatccaagtatgtgtaagttcatttgttcattcatgcatccagtcacttatctatttattcattattcattaaacaaagttattaaatatactatggcagtgtctcccataggaggtaatatgataggatgtttaaaagtagaatgctggagtaggaaatcttccatgtaaacatttgttcagacacttgctaattttaagtttttcacaattttttaatctaggcaattgggaaattatatagtcaatctgtctttatatggtatagcagttctgtgttttctgttctaacttcaaaaaaacaaacggaaacagaattgcccagtgattacaatggcaccagcctagatcagccagcatttagctgactcccagatgtgtaagcacccagccaagatcagcaatgccccctgactggccccctttaaagacttaaacgtagtcctaaaattaatatagcaccttctttctgatccaggtagaagtacgtgtctaaatgtttctagccctatggtagtgtctgccacggcagcagtagcaatgggagcagctgtgttaaggaagagtgagggttccaacttttctgctgatctgggaagtagtggatgtggagggttgcagtgtcagagaaaaagcagccagtagacctaggtctcttggtgaaggcgatgagtttgaggagttccttgccaaaggctgggctggcttagatgaagatgcacgtgtctgggaagataactgggataatcttaaggccagaagtttgagaatttggaaaacgggcacttgtttactggtgggagtgagcgtgctactgttttgagtaacctggcaatgtgtctttttttttttttttgagacagcatctcactctgtcgcccaggctggagtgcagtgggggcgatcttggctcactatactctgcctcatgggttgaagcaactctcctgcctcagcctcccgagtagctgggattacaggcatgcaccaccacacctggctaccttttttgtatttttagtagaaacggggtttcaccatgttggccaggctggcctcaacctcctgacctgaagtaatccacccacctcggcttcccaaagttctggaattacaggcgtgagccactgcccctggccagcaatgtgtcttaaaaagttttacttttgagttagaagcatttattttgacccaccaattctattgacaggaatttattttgcagaaatagtcaaaggtcttgccaagatactcatgatatattattaaataaacaaactgaccacaaaatagcaggctcacataattcagtttttaatgcatatgtacacacatatcacacctagaaaaaaatatggaaaggttttatatggaaataacattaatatttctggatagtgatcataaacaattttacttccttatttctttttttttattttttttgagacggagtctcgctctcttgcccaggctagagtgcagtggtatgcagtcttggctcattgcaacctccacctcccgggttcaagcgattctcctacctcagcctcccaagtagctgggactacaggcaggcatcaccatgcccagctaatttttgtatttatagtagagacagggttttaccatgttgtccaggatggtctccatctcttgaccctcatgatccacccgccttggcctcccaaagtgctgggattacaggcatgagccaccacgcccgccgcttccttatttctttagcttttcattttcttcctaattgttctttaatgagcatgcatggcttctggaattttttttaaaagcacaaaaagattatttttaacagaatggttttacctggtaatggaaaatataatgacattggtatcagggagataaattcagtccagtccttttgggagagcaatttaccattgtatcaaaggttataaaaatatgcaactcctttgatgcaaaattttgtctgggaactggaatgagatgtatcatccccgggtaatagactggagactcatttcttggggtttcttatgtgtgtattttccaagttttcagaaaagaatgtgcagaacaaaggttgtaaaagaaattagagactccttgtaggttcctatgtttatatcattttcttgtcaaggaaatgagctacaaaggtgccagatctaatcttgtttacccttgttactgcccacacttaaactgttggtgcttgtgtttctcatcctacatgcagaaatattagtaatacattaaagaaatgaaagtgggcagacatgcagaaagttttatgtccgaggacatttaattagacattctgggccattaaaaaaaaaaaatcccagaacatttcaaagtaaaagttgtaagcgaaatggcagaatggttatgctgagtacctgttagtgtgtcttgaccttgaatcctggcatgtgatccatgggtctgggaattgtgtgcagcaggtacacagcgtacctgagaggtaatgaagccagtgttttaataagccctgccatacttagaaattcaaatccatgttactcccttccacgaagggaggttatagaattattctagtacttctgatagccacaaaggtagaaggaagtgtagaatgagctccctgtggacccatcaccaatttcaacagctgccagcatttgccaactcatttcatttatttttctcccacctcatttattgaagtgtttttttttaatttaagatatgtcagttcacccataaatactttatctcttttctatttcacccataaatatactcatttctaactgataagcacactttaaaaatgttttaatagtattattactttttaagagacagagtcttgctacgttgcccaggctagcctcaaactcctgggctcaagtgatcctcctgcctcagcctcccaagtagctgggactccagactcacaccaccacacccagccagaaaacatgttttctaactagtcaacataccattatgccacctaacaaaatgaatggtaagtcctcagtatcatctgacatccagattgtatcttaattttcccagttgtttcaaattttctttgttgcagttggctctagatactatatttgcttactatattttatgtcttttaaaaagtgttttaaaacttctgtttttcaatagactgaatgtatatcattgcacttctctgtgcaacacaagaaaactataatgtttccttatcatcatccttactattatactcttagtaaagccctgttacatagtttgatcatcttatatgtcagactcaaactctgaatgacctctggcttttcctttttttttttttttttttaattaaaaaaattttttttaatagagacaggatcttactatgtcacccaagctggtttcaaactcctggactcaagcaatcttcctgcctcagcctcccaaagtgctgggattagaggtgtgagctgctgcacccggcctctggctttttctcaaaattaaatccacctcagtgtccacatactttctgccagggaggataattaaaactaccttcagacagtgctgtggcatctccaggtggattcagaacaagattccccaaaccagccgtgggcagtgaatcacggggtgatagttctccgtgtgtctgatttgaagggtcctcttcccttggcgtaacatcaaagacagatcttagcacctcatctgcatgaactgagtgtataaatgcctacctgcttgacttacctgttctgacaggggctattggacttaccactaatgtaattgatgtgtttgttttcacacagataatcgcttatcagccgtatggaaaatctgtggactggtgggcctatggcgtcctgttgtatgaaatgcttgccgggcaggtaatgttttgctacattttcatgtttgtttattgctgtgttatgtgaatacttcagctctggttgggcctcgagagcaagacctgacgttttagtgcagctggtgttggcgtgacttccctgacccaggcgaaagagggagaaacgcccccttcaaagtggatcacgttcagtatgcacagaaattatctctggtcatagaaactccaaattgaaagctacaacctggagtgtagacagtgtcagtttcacgttatgaaatgtacatgttggccaggcgcggtggctcatggctataatcccagcactttcagaagccaaggcaggcggatcgcctgaggtcaggagttcgagaccaccctggccaacatggcgaaaccccatctctactaaaaatacaaaaattagccaggcgtggtggtgcacatctgtaaactcagctacttgagctactgaggcatgagaattgcttaagcctgagaggcggaggctgcagtgagccaagatcgtgccactgcactgcagcctgggcaacagagtgagacggtctcaaaaaagaaaaaaatgtgcacgttgatgacagcagtggcctctaagttttcagtatcttaaaactggggttgggttatatggttccctgcaagtttgtctgcaaagattgccccagctgctgccaatgtgtgtaattagtattattatttaaggaagaagacagttaccttgaagaagtgttttaatagtttctccccatctcctcctatctcacccttggcaattcgttgtaattttcactgaagtccagtgaggctgaacatccagttaaggaaggtaaattagctttctcttatgatgtgacatgtaccagataaccatgtgccttattgcctaacatggcactttctaatataatggccttaatatctgtgtcatcagggtgaatcgtactatctgccacttctaggcctggcccctaagacatcctttatgactgtcctcatgctctaggctgaaattaggaggaattagtggagaaatctgagaccctacaagatggtggtgctgatggatgcgagaagcctgagtctttgaatgaccctgtggtcagtgcccacccccacataggacacttccgtggcaaagtcccatgtgggggtggggcactgacccacaggttcattcaaggacacaggtttctcctgtccgtcagccctactaccttttagggtctcagatttctccgctaattcctcctcctttcagccgagcacagatcagttacataggatatcttaggggccggcctagaaatggcatgtatcacttctgcctaggttccactggccacttggccccagtgggacacaaagaggcaggaagtatagcatatctgagagctcagcaggggaagcaggcttggtaatcacgaagcaggcttggtaatcacccagcagatctctgccttatactaaacatgattctgccgtgggcagctttttataattcccagcactcacatgctagtgccaagacctgtgactctccatagccagaagccttagtcagagacaatggaaagagatggccatgctgtgcgacagagccacccccaaagacatctttgtttctggggaaaaagtcttcccttcccacatgttacgtccattgactcatttattcattcactcaccacgtatttattcactgaatgcttacaatgtgcatggccataaggatgaacaaaacagacgagaatccttaacttcgtgaagcttacagcttagaggaggagagacagcagacaggttagataaggaaaatgtataacacagcagaggtaagctaggaagaaaagtaataaagcaggaaagaagatagtgttgggggaggttgaaattggccagagaggataaggttaagacctaaaggaagtatggggttgtctgtgtgcatatctgttgaaagggcattccaggcagagggagccaccacgcgaaggccctaaggccagggaatgtgcagccacgtttaagaaatggaagctcccagcagggctagagcagaattgagctagagagggagggagtaggaggcctgaggccagagaggaagaggctctggatcctgttgttagcagtggtgcatccccatgaggctgcagcaacctcagttcttgcctcctcagaagaaagaatttgactgtggggcatcaggtagagtgagagcctaagacaagctgtttctgttttgttttgttttgtttttgagatggagttttgctctgttgcccaggctggagtcggtggcgcgatctcagctcactgcaccctccgcctcccaggttcaagcaattttctgcctcagcctccttagtagctgggattacaggcacctgccaacacgcttggctaatttttgtatttttagtaaagacggggtttcaccatcttggccaggctggtcctgagctcctgacctcgtgatccacccgcctcagcctcccaaagtgctgggattacaggcatgagccactgcacctggcctaagacaagttttagagaggaatgaaagttcatggaaaagctttcaagcaggagcaaaaggaagtaaagtacacttggaagagggccaagccggcgacttgagagatctagtgcactctttgacttttgacttggggttttatgcattggtgttcttccagggtcttacatctcttctcccctgattcttcccttgggttgggctgtctgcgtgcgcagtggcctgctagtgcttgggaggggcggcatgtgcagtgtgtttactggagttacgtgtgtgctcagctgaggcattcttcccttaccagtcagatgtcctagaaggtggtgtaccagttaaactccgccatgttgccttttcatgcgcgtgcttgagcccactcgcccaactcctgaaatcttattgggaagctgctgctcaccagtttcaggtgtttccctttattgggagactgcctttccttggtgctggctgcgaccaattattattttacagagagagagttaaccacctgatggtcgcctgacattcctggtgggtagggggagccctctcctgccctgcccatgtccgaacagccacctgttgtaacactgtgaccatgaacgtcatctccagatcagcggctttgcctctaggatgggaggctgtggatgatctctcctttatgtgtctttcattatatttcctaaatactgaaatggtcttgtagacattgaaagacataaagctttagcctgcatttgatcattatttctcaatggtgttaaggcttgactgacatcaaaagagtggtttattatttatttagttcccctccccccaccccaaatcaaagcattcctcttaggccaaatacgtccgggtgtaaacacagaaaggcagttcgtacacagtcaccatcagtgagtcaatggctggagaaacaggagttgtctgctcctcaagttaatttccccctctttaaaatttttacagtaaaattcggctctgaattacaggccccctaagagtcctgcttttcatgaagtcacaaaaagccaagtccccctcttgatcccacttgaatgttcagctcttgagtctggaaaacaaaccctgctttcattaagagtcacatttgcatatgctaacatgcaaaaggggctgggcggaaacgaagccaggatctgtttccgagggcgctttacaagaggtcacgtgagtagactcttggccagcaggagacaagaatttcagaacccaggtctgcaggaaagtcctcctccctcccgcagcctggcttctcccctctccaagccttcctgggatctcattcactaggggagaactcagggaatgctttcttctggcagagaagtcccctttggggggtgcattttgaagctctgccacactggcctcagacctcatttgcaaattggcctgaggtgatttacaggccttatttaaaggtttccctactaagctcacgccccctggagagcaccaggctccagctctcaatagttctgcaaactttctggcctgtttccaatatttcccacactgcttctcagagccacttagcctgccttatatgcatactttcaggtctccatcatctctattaaaaacggtgatggctgggcccggtggctcacacctgtaatcccagcacttcgggaggccgaggcgggcggatcacgaggtcaggagattgagaccatcctggctaacacagtgaaaccccatctctactaaaaatgcaaaaaaaaattagccgagtgtggtggcgggcgcctgtagtcccagctactcgggaggctgaggcaggagaatggcgtgaacccgggaggcggagcttgcagtgagccgagatcgcgccactgcactgcagcctgggcgacagagcgagactccatctcaaaaaaataaaagaaaaaaagaaaacggtgatattctttaaagatgacaccttagaccaggtgcagtggctcatccctttggggcccttgggaggccaaggtgggtggatcacttgagtccaggagttcgagaccagggcaacatgacaaaatcccgtctacaaaagatgcaaaaatgagctgggcgtggtggcaagtgcctgtcatcccagctacgtaggaggctgaggtgggaggattgatcgagcccggggggtcaaggctagcagtgagctgtgatcatcacaccactgcactccagcctgggtgagagagtgagaccctgtctccaaaaaaaaaaaaaaaaacaacaactccttaaaggcactccacattctggtgcaatggcaggcacagataacagcctttgttcctctaaatctccacctcacccgcctcaaacacagtgttttcattcaaatccccttcttcatctttctctctgactcctcaatgcaaatttaaatgtattcctaggctgtcactcagctcagaaaggataatgaaggctctacccagtattatccacagcccctccaagcttcagcaatcccagagacccagcaaacggaatagatgttgttattgaaaagtaagattaatgataaagtcgttgacagggttttggtctaagtttgtcctctttaatcgcagagggctgaagatgagcaggaaaaaaatagtttattgccattttcttctcatttgctttatttattgtcagcagccaagggggcagttaagaataaacagcctcagtctttattcagttcctggactgcttgacaaatacaatcacttttggggcataaatagtgtttacccagcactctaatgagcaccttgtgcctgcaagtgttctcggtgatcgtcataaagggaccagccctctccttatgcccttttctccctgggttatttatgctttgatttcactcctactgaatcagtaatcgccacttcatcttaacttcggcctgaattgtccaggggagcatgcctagcccccagcccaggtttccgtgatttgcaaataagcgtggcctccatgaccacttcctagctgagatcacaccagtgcagtgaggtggctcacagctgtgattaggaatccttttttgcaaaatgtgaaccatcactcctcatgtgttggtttccacaaatcacatattgttaaagtgggaaggagcgggtgagaggggatagaacccattcagaaaatgtttacaccaacccaagacttttcaacaggtagcttagcctggaacattgagtccaaatttgtagaaattaaaaaccatgggaatgggggaaagaggcgagagaaggcatccaaaatggtaatgtactaaagcacctgagtgacacgttacccccatggtccccaggctaagtggctggcagtaccagaaaggaaaaggaatagaattagtaacttttcaccgttcccttgccttcaacgccagggcctgagagcgagtgattacctgtcagatgctccagggagacttgagcctagagagacttaacaaaggccgtaaatgtgttcacatttttttaggctgcaggatgccacacctgggacgttattatggggatgtgattcagagaagaaaacaatgatatgcacaggtgtctctagtagcgttagtgatgagggtacatgctggaagcaattgtaaatgtgccatggaacagtggatctgtcctgatgacgcatcacctcaatggcattcaactcatgggaacactggcagcaacaaagaaaatgtatttgcaacagtcggtgaaaaacaaaaaaactccaaattatgcatcataatttgaaaataatataagaggctgggtacggtggttcacacctatagtctcagcactttgggaggcccaggtgggtggatcacgaggtcaggagtttgtagaccagcctggccaagatggtgaaaccccatctctactaaaaatacaaaaattagttgggcgtggtggtgcacacctgtaatcccagctactcaggaggctgaggtgggagaatcgcttgaacctgggaggcggaaggttgcagtgagccatgatcgcaccactgcactctagcctgggtgacaggcaagacttagtctcaaaaaaaagagaaaataatataagaaagcataagaacccacataaaaataagcgcaatttttgtgtccaggtaaagggaatggggatgcttttttcgtagacttcccttccacaccatattacataattttcgtttaaaatagggcttcaggccaggcgtggtgacacacacctgtaatcccagcactttgagaggccaaggcgggcagatcacttgaggtcaggagttcaagaccagcctggtcaacatggtgaaactccatctctaataaaaatataaaaaattagccaggcgtggtgacgtgcacctgtaatcccagccactcaggaggctgaggcaagagaatcacttgaacccaggaggcagaggcttcagtgagctgagatcgcaccactgcactccagcgagtgagactccatctcaaaaaaataaaaaatataaaaataaaacacgggctccagggagcttttctgaatgtgctggtcattactgctattcaccaggtactcccagtcttcctccctcctggctcagtaggattgtacttcctttctcatgtgtatttgtggggtgtcagggagcaacatatgaccagcaccggccaatgagatcagaggggaggtgtccagggtggggctggaagcgcaggtacaagacatggcagagctgctgctccagcctttgctgcagcaagactgtgatggcagctgctccatcccggtgggtccccgaatgcaaccagcagaggcctctctgaccctcaacgtacaggtagcataagcaggaagtgaaacgggttgtcttatgctttggagatggtctcggttgtttgtttccacagcaggacccagcctatccttactgataccggaaggcacagttaagataccaatagtctacatcttgaagtaagccagtcacagggacgtgtatcgtatcaccccacttacatgagatgcctagagtagtcaaatcatagcaacagaaagttgaatggtggctgtcaggggctgagaggacaggagaatggggagtctcttttgtgagtggagtttcagttgggaagatgaaaaagttctggagatggccagtggtgatggttacggagaaacatgaacgtacttaatgccacagtacagtgcacttaaaagcggttaagatggtaaattttgtgagagagagagagagagagatatatatatatatatatagtgtgtgtgtgtgtgtgtgtgtgtgtgtgtgagtgagtgtgagtgtgacagagtcttgctctgttgcccaggctggagtgcagtggtgcaatctcggctcaccgcaacctctgcctcccgggttcaagcaattctcctgcttcagcctcccaggtagcagggactacaggcgcactctaccatgtccagctaatttttgtatttttagtagagatggggtttcaccatgttggccaggctggtctcaaactcttgaccttgtgatctgcccacctcggcctcccaaagtgctgggattataggtgtgagccaccacacccagcctgtgttatatatattttatcacaattaagaaaaaatagtctctatctttgcaacagaggttatatatattttatcacaattaaaaaaaaaatagtctctatctttgcaacagaggaaacagactaggaaaaaggatgcctttgatttgatggtattccaaagctgggaggaggcacttaactactcctcttccctatacccaagaacagcccccttttaccttcttcaggttcatgccaccttcaaccagcaggaatttggggaagcaacacagaagctgcatcggccagcagctgggaaggagggaggcagcctgattcccatcaattcattagagctggaaaaccatgccaggtctctagcgcagaggccagtcgctctctacgggatgacttgaaacatctcaggcccccagggctgccccacccccttcattttcagaactcatcactgcatattgtgcaggctgtgaatcagccttctaaaatttaccccaacacccttgccctcattagagtcttctttacatgctgggtggggctgtagccgagtaccctctgcctcacttcacccctaccaggagcagtgttggatgtcacccttcacagtggggcaggcggaattgctcataatggctaagagccccaggctccaaattcaggatgcctgggttagcacctgtgtcctgagactgatttgcggagtgagcagtgccacccaagccgtctgcacagcacgtgacatgcagagagaggctgagaaatgaacgccactgtggtcactttcgctgctcctaccctcatgcccacgatgctcctgccttattgggtaacatagactcacagcggtgaaaaacgtgaggagcagagacatgtcccctccctgacatgtggtgacagagaatccctaatccttggggccacatcaaggctggaatgcacaggctctgtcacgggtgtttggtcttgtggctttgttacagcttgggcatcttattccaccaggcaagcctaagaggcctctgagaatccttccagccctagactaagaattcacattgagttaaacagctttgttcactgcaggacttctcagggcctgtacaatttaaatgttaaagcaaattgccagagaggggtagaggatgcaaacttggacccaggaagatgctgtaggattaatgttctaaggaatattctttggggagtgtcagtatccagccttcagtggggcccagagaagacttgacagtaaaagtcctcctttcatctatagaatcgaatccctgatacagccattcaccttcagaaatgagcatacgtggggacagctcacctggcaaagctggttcccatgccaggagacaattaagtaggtgtggtaggccagtgccctgcacagaatgttccccaaacgattcctggccttccacatttgaaggtggggtggctgcagctgcattgacctaatcgtcttcaaatgaggagaagcttctcactaccctactcaagacagatttctggggaagctccacctgtgttccttagagaacgtttctcttaggcctttggtttgcattgtctgtgacttggcccctgcagcgttcctgcagctaagattcaagcacctccagagaggctgattgaatcttgctggcgcctttgtcactgcccaacaaggtgcaccccatttagcccgcttcgggggcatgcagcctacacggtcgcacagggcccaagcccacaagagctctgtgcatttggtttggtgctccgctgtcgcatctggaaattcttaataatttttcaatgagggactcccgttttcattttgcactgagacttggaaagtatgtgtctggccctgaccacaggccctcttgggccatgtggtgaggtgccagtcagtgacctggaagcagagcctctgccccgctccctgccagggcacatttacattgcagagagggtcacacagccagttcaggagccttgagcccctgcagggtgcaggccacgccctcagcagaaaccacaccatgtttttgttttggaaacagagtcttgctctgtctcccaggctagagtgcagcagcgcaatctcagctcagtgcaacttccgcctcctgggttcaagtgattctcgtgcctcagcctcccgaggagctgggactacaggcgtgcgccaccacagtcggctaattttttgtgtttttagtagagatgaagtttcgctgtgttggccaggctggtcttgaactcctgacctcaggtgatccacccacgttggcctcccaaagtgctgggattacaggcgtgagccaccacgcccagctactacatttgttttagttatgaaaatctccttcgccaaaactcagccaggtttatggatcactgattagggaaaatgagaaatgttatgggtatcataaaatagatgtccagaagaagcaggctgcgtgctgttaggcagggaagatacggtggggtggacacaaggatgacctgcactgtagctccgtcacagctctcccccaccactgcctgcctgccctgccctctacagatgaaagccacacgtccccctgatggcacaggtagctgtccctgctgacacaggtggccgtcggcagcctgcaccccctggtgggtgcccccccaagctgccctgggggcctctcaggctccatgttgctcctgctggtggaagttgctgtggccagctgcccctgccctgttctgagtccctcacaggcaggctcattttagctctcttcacccacctgcagcttccaccaaattgaaccttccttacaccaagcacttacaacagaaaaagaggcctatttatttgtatttccagaccaaaaaatgttgagtggtaccagacacccaggcctctctctgtcctcccactggggctctctgtagacttggcatctttccctcagggcacgtggctcctgtccaggactgggcaggggactgaggtcaggtctcgggtgttggatgaacaggttgaggtgatttgtgggtggtggttgaggggagggacctacttggctcaacggctgcctctgacttgggagaaaatgtttgataagaagggcatccttctgactactgcgaagttacctgtgatcgaggattcagttcaaaattaagccaaacaccatcactgtgtgacctgcccgtgtcagccaaagtgactgactcctctttcccacgagaaaggaacatctcaagattaaacaagaggattctgtacaagcgctggtccttgctctgcctttctgacgctaagctcaaggttacgcagccaaagggggagcattacggaatttcccatgaacgctttcctcctgtgccatcccgccagagtgaccgggaagtgatggatccctcaggactacagacatgctggaggaaaaagttcaaagggcattgtgagctcagcctttcctcctagaaggtgctcaaggcccctcccaagagagttgctctgtcttaaataataatactgctaagttgccttcattcggcgcttattgggtacaacataaaatacaaggcactttactcccagaaaccccatcttacaagttggagaactgtgtttttgtttttgtttttgagacggagtctcgctctgtcacccaggctggagtgcagtggtgcaatctcagctcactgcaagccccgcctcccaggttcaggccattctcctgcctcagcctccccagtagctgggactacaggcgctcgccaccatgcccggctaattttttgtatttttagtagagacggggtttcaccatgttagccaggatggtctcgatcacctgcccttgtgatccgcccgcctcggcctcccaaagtgctgggattacaggcgtgagccaccgcgcccggcctggagaactgtgttttaaagaacgaagtcatttgcctgtggacacccagctgggaagttagtagagctagaattctggtccagatccacctgactctaaagccacaaggtcccacggggccaccgtgccttcctctctcagcctggtaactgtaaacccagtcaaagcggatgagggaggagtccaatggaagctaaggtcccatcactgctgctgtgcagctggaaggccctccctcagagcagctgcttgttgggtcagaggcccagtgtgaattactgggaacatcctcttaggccacgttctcaagtccccttcaccccaaatgaaagtgttggcattttctaccggccacccccaccttctgaccacaaagccatctgtaacctaacttgatcgtaattagatttttagcacataattacaagattaatggattaatcataatttatttgcaaatcattaaaaacattactcaaaaacactttccctaaagattgtttgggttgcccagggcaagataattaacgagacagaggggaaaaaatgaaaaacacacaaccgtcaatctcattaaagatgatcaaataaaccgtcaagttagctgagcaaactgtgcagcctgtggtggggctgagaaacctggtctgttccttggtgctgaattggctcttcaggcaccatgtgaatgaattactctgcctaaatactttcccatctttctttttttccggaacagcctccatttgatggtgaagatgaagacgagctatttcagtctatcatggagcacaacgtttcctatccaaaatccttgtccaaggaggctgtttctgtctgcaaaggagtaagtcgatttggataccttttgtgatcatggaccaagagctttggtaggagaaatactttccccacacttctaagagagatggcagaaacaccacaaacccacaccactgcattttggccatcgagggttggggcttggtgtcatgccccaagataaccagcaccccaactttggacagcatggattagtcttggcctgttttgaactctgcacaaaccgaaccttgtagtgttgctcctggcctggctgctttcactcaatatggtgattgaggatttagttcctcctttcatattgctatgcagtgttccactgtgtgaacacaccatcgtttccttatccattctactgggcagggcacagtggcgaaagtgaaggccaagagaatggattggaatcccaatacttcctgggactctggcccagtcacctaatgactgtaccgcacttttcattctaatccatttcataaaattgtggtggggactaccagatgtcatcagagtcccttagaaagtatgtgctctcgtctcctgtcttacttggtgtgacttagttctttctttgctacacttttcttgagctatagcatacatacagcaattggcacaaatcatcaatatgctgataaatgaatcttcacaaaatgaatccacccatgtaattgcacccagctcaagaaaccatgtttccaccaccctggaagccctctcctgtcccatctacagtcactaccccgccccaagataacctgccccccaactttggacagcatggattagtcttgcctgttttgaactctgcacaaactgaaccttacagtgttgctcctggcctggctgctttcactcaatattgtgattgaggattttgtctgcattgctgtgtggggccatagttcctcctgtcatattgctgtgcagtgttccactgtgtgaacacaccatcgtttccttatccattctacttctggtggctatttggattgttcctgctttggtttgaggctgttacaaacagaactgctgtgaaccttctggggcatgtgttttggtgaagatatgcacacactttggttgaggaaatgctctaggaatagagttgctggtcatgacttgtctagttttgaatggtcaagagttagatcacaaagctattttcaggcttagtaagatggagtacaatatacccttaacagtatctggtgagtgtgatcatttgtgaggcatttgtcacgtgtcatccaagagcaaggcacttggaagagatactgagatcgggaggaactggcttctgccttcagagagttcatagacagtgtttgtctctgtgtcctgcagtgggcaagtcggaattaactagtcgccttccttgttatagcatttatttttctaatctatgagtctttgattgataacattttggcccagacaatacgtagacatatgatgcttattatggcatcctctgtgatgctagactgtgatgctttcagcacacacaatttttagtgattgcatgcttttttttttattactagatacatgtatagcatggtgtctccaaaacagacaacgtgtgagatgtctgtttaaattcttcttccatttggccatgggttcagattgcttccttgttcccttgtcttgaaaaccaccataggaagggctattcttgccaatgtcatttttgtgagttggcttcacttcgtacaagccactgagtgtcttggtcagctctctgagatgctgtccaggcgtccacaaagtcagggctgtaggcagagctaggcaaatggaaggtgctgtctgtgggaagcccttgacatccattgttctccttttctccttttcctttctagctgatgaccaaacacccagccaagcggctgggctgtgggcctgagggggagagggacgtgagagagcatgccttcttccggaggatcgactgggaaaaactggagaacagggagatccagccaccattcaagcccaaagtggtgagtccagaaaagcagcctgttttcggaaccccatgtccccaaattctgggagtatcccactcacctcttttcttggagagaggaggccggtgcccctggcttgtacagggtgaggaaacgggccaggtttcagccttgtcctcagtcctgtggcctcagcagccgggattcctgctgccttcagagagtaaggaccgataaggcagggaggggaaccctgtgcacacttcatcctccagctggacagctgcagagcacccccgcacgactagggagtgagggcagctgtgctttaggtctggactttgtggactcgcacccagcagggccgtattcacagccttcagtcctcagcaggactcaggcttcgtgtctgtctctggttttcctgggtttgcctggcaccgaagggagctctgaagcacaaccccgtcctagccagcaactaggcagggcctgggccccgccccctcttccaccactgcctccactgcggggagtgagtgtcagccaccaattctaatgttgtcagcttttttcacactctccctgtttgattcccatttttttcatttatttaaacactgtatgccaggccctgttctgagtgccttacgaatattaattcactcaatcatcccagcagccctgtgagatgggtactatggtccccagtttgcagtggaggaaacagtcacagagaggctgagtaacttgccagaagacacacagctgatagatggtgaaaccaggacgagtctttgtcctcacctactgcaccatcgctccatctcagcaactgccctgacgctgatgctgtgggccctaattgttgattgcggccagcaagtgcctttcatgtttatatctctagaggtaaactgagagcctttaagaagtcagcctgctcactcaccacctgccactttgcagagcctccaagggcgtcctgtttctaagggccgggcggactgtgccttccagctctgccaccatcttggccagcatcaggcagctccccattgtgcctctgcccggggactgcagagagctgctttatgccacagtcagtttcagaagcatcgccctgttggtttcgctcaaatgtgtctcctctgacaggtgccccatgagcaggccaggggacccacctggggtggcacagttgccaactgggtggcacacagccttattcttagagcagcaacttcctcaccatgtgtgcctctgtgtcctctaccccaagaataaaactgctgttggtgagcccactggattttatttttcgaagatatttttagcacacactgaagaaaaactaaaattaatcaggtcagttgacttcctcctgaatcatcgtttcaaataaggcccttttgtatctgacacccccgccttttctttagtcagccctgcacactgatttcaggggggtctcacgggctcctgcccctcaacatacaaaacccggtctggaggtttttgggggtggggagagtgattaatggtgctgcaagtggtctcagtagaaaattctgttagggattatttttttttcctcttctgcctttaatatttatttgttgtcttaaaatatgaaggttatgcaacagcatcttgaacacagcttagtttctttataggaacaacgtagagatgcgtactgaccccgccttgagggttgggcaaaatccaattacctgtcagtcactttccagaaagcgatgagttgcagcaaaaccaaccataaaacatgtctttttctatttattgccacgttatggcagaagagagtgtttatttgcatagtctcccacattttgtggatactcggccctaagctcggatatagggaagacaacagggcgacttggctccgcaggcaagaatgtgaactgttctctgtggtccacggaaatcacaggaagcaaaattgtacccatggcaggcagctgagttaggagcagtgtttatttatattttattcctggagcgctactgtttgctggttttttttttttttaaattattatactttaagttgtagggtacatgtgcacaatgtgcaggtttgttacatatgtatacatgtgccatgtcggtgtgctgcacccattaactcgtcatttagcattaggtatatctcctaatgctgtccctcccccctcccttttgtttgttttttaactgaatgctcgttaaaattaagaaggaaggataaattgcccctggctgtgaagaaatagcccctgaactcacaaacggaggcagaaattgtcgacccaggccctaaaactggaggtttcatgcaaaaggccccgcttggtaaaagctctggccagaaggaaggaagagatttctcaggcagaagcccgtgttctgctggaaaacctgtgcacaaaagaggaaggagctagaaagaatacagacagacaggaaatggacccacagagggaacaacgacagtgaagatagaagcacgtggctgcagggagacccgtagacgctgtgttcaaaagcggagagcgtcaagggcagagagataaatggggcaagctctggttcctggaagggcagcgatgtgcctcttgagagctgtttcctgtagtccttgccccgtgccaggcagccgagtgaggctcatcgcagcatgtcatgcaagggctggcaccaccgccttcagcggtctctgaggactgcactctgttcagtggtgacacgctggggcagagacaccacgccaagagccattccagtggctggagaggacatttagaacagcaaaaagcaaccaaagtcgaagctgcacaatacgctctggttaatacaaacagcaggagagaactagcggcgtagaaaagttattctgggatgtggtgttccagcttccttggtgaaaaatgtactgtagtttcctgatccagagctaactgaaaagtgaaatgtgtttacagagctgagcattctctaacgggtcattttgttatttcaaagagagatgtagcaatgccagcctaaatagtgctgctggagaaacgatcaggcaaatgtcacacagctagcgactctcaccgtgagcccatttctgagtggctctcgcctctcagcagttcttataatcctggctcaccaaccttttctgtcttggtgaagtctgcctgatggttttttagcaagcgctggtgagtcagtttccctgagacttgcaggcttaaggacaggtagctgttctcacgtgcggtgatgctcctggctcccatggaattaaacctttgcttactaccaaataccagtagcgggacttcaggttctcacagttatttgcaaactgcttctacagatcagattgagcttgtaggatcaggagtctatcatctttgttttattaatttttaaattttttgaacctccaatgaaagagtcttccagaatcactgacttccctaaggagggtagaagcattccactgctggacagccacagagcttatcagggaatcatggttcctctagtgtgctgtcttaatccctcttcctgactgccagagtgacttgactgaagttaacctttagaccgcagtgccatgcaaaatgcgatcccagcgcaaaaagcatctcacaatgccgtgatccatcaggaggttagcacgggactttccatctcacggcgacattaagatcaagatctgcagtacagctgtgggctggattctgtataaggtcacacgtaaaggagaacagaaagaggagagtgaccagcatcgagtgtgtgggacagtggccatctcccttagcagtggccaccttccctggcagtggccatctcccctggtggtggcagggtcccatggcggtggtcatctctcctggcagtggcaagcctggaggctgagatgtgagggaagaacctgcccctgtggcagtcaacagtgggagagtcctgtcctggacagagccatgtctgtccctaaaaagctaccatgtgccaccgtgaagatgatgattttctggaagatgggacaatcacttctcagggatcattttgtaaaaacaaaagcaaagacaaccacagacagcagtgctgtgagccctggacacaggcagccaacaactagctcttcctctttatgagcaaaacacaaaacgagctggtttcggggatctcttcaaggaagcacaatgtgaagcatcctctgctccccggacatgaggacggtcagctcattgaggaccgtcagctcagtgaggaccgtcagctcagtgagggccatcagttcagcctgatgttctcaacaacaaacccgagtcatcaaaaagaggcctgtaggccaggcgtggtggctcacgcctgtaatcccagcactttgggaggtcgaggcaggtggatctcctgaggtcaggagtccgagaccaacctggccaacatggtgaaaccccatctctactaaaaatacaaaaattagctgggcatggtagcacacacctgtaatcccagctacttgggaggctgagacaggagaatcgcttgaacctgggaggcggaagttgcagtgagcccagattgcgtcattgcactacagcctgggcgacaagaatgaaactccgtctcaaaaaaaaaaaaaaaaaaaaaaaaaaccggaatgttcagaagagtctaggtaaggagaaattttaagtttaaaacagatgtcgcctctggaaagggtaatcttcagtgactgaaggagcagtggatgtccaccctacctcccagcgtcaggtgagcgtggaggcactgtggggaggagggtacagccagcagcttggcccagcaaccagaaggctcaccgagggaaggaaagcactttcggctttgccagaaaaataaaagctccaggattctgatccaccgtcactttgaattttgtagctttttattctgatttagaattaatgtgaatgaaatggccaagaacagccttcaaatttccactcatcctgcttgtaatcagtagcagtttatacaaataccaggagcataaggttaattgatttttctttttttagttctagccgttggcaccaaggagcagaatagctagttcataggcaagccagaatcattcactgtacttaaatggttattagagagggagaaattaatctataatgttaacacaagaaatgtattccagagtggttaggcagagcacattggaaatagacctttcacagatggccattttttttgtgaaattactttaagtattctgttttttaaaaggcagaaaaatagaactttcttcaggacattgtctccaatgacccacagcaagagccaaagagaataagaacattgaggacatccctgtagtgagaacacacaatcggggttccttttcccagtcaccacaaagtccttcatttcccagtgccattagcttgtttagagagcttgatgatcatttaattatcgaagctggtgcaaggatccttttttttttttaattttattttgaaataatttccaatttcagacttgtggaagggccaggaaagtaatttaaagaactcctgtattcctttacccaggttccctaaatgtgaacattttagcatgttcgtgttatattgttttttttgttttttggggggggttttttgttttttttttttttgagacggagtttcgctctatcacccaggctggagtgcagtggcgcgatatcagctcactgcaacctccacctcccaggttcaagcaattctcctgcctcagcctcctgagtagctgggattgcaggcacctgccaccatgcctggctaattttttttatatttttagtagagatggggttttgccatgttggccaggctggtctcaaactcctgacctcaagtgatctgactgcctcggcctcccaaagtgctgagattacaggctgacctcggtatcattctttttctatatctctgtctgtgtgtaggtacagacatacacatctgttaggttggagcaaaagtaattgcggtttttgccgttacttttcattttttttgccattacttttgcaccaaccttaatatatacttatttttttctgaaccatttgagagtaagttgcagagttaatgcttctttacacctagataattccatgtgtatttcctgaacataaggacatctcctggtactatgttcttttaataattactccagcaagctaggtatgtagtgcaggggctctgcaggtaaaaggaggagggagggtccctggcatggctgtgtcacagatcagataccataggcagcttgggccacatctcatcagttctctagggtggcaggcagcttcattctcttggcctttctgttgggccagtaacaatgatgccaattaaaattgagatctcaagatgggaaggtttgtcaacaacatacaaacactaaccagccattggagactacagaagtcacatcatgctgtatctaggtttgatttaagcctctaaactagtctaagacagcaccttttacttggctaattagaggcaagcagtttttcctattctttaatcattactctctcaaatacttttctgcttagcagagaaattggaagaaatgagacatttaaactaataatataaataagcatcactactgcaagcctctgggagcttcaatgatgagtgacggcataaatacagaccctgtgtacatcaaagtgtatgaattgacaggtttccattgttggcagtgaaggtttccaacaacgatggccattacaacttttcttggaaaaagagctttaaatcctctaaatctggccattaacataaagaccaaatggagtacatgtttttattccatagattacagcccatgataagccagaaccttcaccctcatacacacgtggctctcacacctacaggaatcccctcatttaatgtgtggcttatggcctctgtctatcagcaaactcatcaacggaatcagccttcctccagaagagagttttccctttctgagataatgctgcagtgctgtaggtgagctgagtactgtttaattttgtcagagaaaccaaagactatatgaagttggcaggaggtgaaaggggtcccaatcccttagaaaaaattactattaacatgctctctctatatggtgaaatgaacagttaagtggtagagaagggcataaatgaaaagatatctccccaactactggtcctactcttcatgatcttttctgtaaccttctagaatgtttctgtatgtataaacgtatacacagatgaggttgtgctgtgttaaacacaccttgcgtctttcacgtagcaatgtatccgacaggtgtttccgcatcagctcacgtgggtttatagcattctttgcgtgtccattcccgattctggacttgcaaggccaggaactgactattctccaaatcctctcctttgtccgttcttattctccagactttgtgtaccaaaatgcactggcttcagtgggcctccaggtcttcggtgagcacgtttccagaaccttgggtgactaaatgagcaaactaaccccactttataacccttaaccgtgtgcccctgcttgtgttggtcatgcacgtagcccgttccctgagcatgctaatcttcagagaaagggcagaccaatggccagacccctttgctggatagctccttagtatggacattacctcccaggaagcccaagtgaaatgcaccagcccatttctgctgttatttaacttaaaagaagacgctgtgcaaccacaagtcagagagctgtgcagatggtggcgatgcggttgctaaggcgctccactgtaccccagcactgggacctgaatacaagtgagggttcccctacgatgaagtacctcctgcatttggtcatcgtaaggggtagctcccacctcgttaggtttcctttctccatagtcttgcaacatccctttactctttatttgttctgcatctttcctcttcttctgggttttgtttggttttgctttttaacagcagtgttttgagctactcatatttcccataattcccatagctgagaccatggggttgtattctacatgactgagacgccgaggtaaagggcaggggtgagaccaacacgtgtattgctcatgctcagaggcctctcccaggtaagaatcagccacgaagccaactcctgcattgcatctcagtctcccccacaccctatcacagaatgaaaggggctgtgagcaatgtgtttgccacacaaggctccagtgggggcacactgcaatcccagattccacccagagtccgtgtcattcatgttttgtaacatctttaccaatgcctgatttctcttgggtccgttgcattcattgaagtttgaccaaatgggtaggaatatcaaaaacgacaaaggagttcattcctgaatccagagatcagaaagagggaggtagcttattaataacgttccttcgtccctcagagatcgatcacatgccttttacatgctagtgcttgcttcgcagggtgtaccctatgtctgtcctgcctcctcgctgaggaagggcctcatgcccactagttccctggatcctcacaacagcctgggaaggtggatggtcacatcaccatcttaccttcgcagagagatgcactgagtttgccaaagctatatacattggggctcttgatctctggccacatccttctcccctctgtgtccccactttcccttgggtgccgacatcgcctggtctcagggagttcagcagtcacacgctgactggttgggtctgaccaccccagtgccctcttcccctttatctctgtcccatacccatcgtgtggtacgtcacatcccagagggcaaaagcctcagtcggcaaaaggcgcgggtgacctttggaggtggagacagtgcgcacccagcccagttttgctcacaaggtataaatgttacttttagtggccatgtgctgttgggtggcctacagctctgaggccatggacagccacacctgcccgctgtcacagactgctgtagaggctgcccttccaatggaggtggtgatccacctgcctgcctcatccctgaggagtggcgggaggctgcctgcagtcatcttttactcattcacttggcgttcatgcagtcatgctaggtgccccctcagccctttagcctctttgcttcttcttgctccctgctcagctccaagatggcacccgaggccattgcccatcaagctcatggtgatgagtaaggttagatcattgatagtaggaagaatctcttccacattaggaatgcagtaccttcttgaatctactgcttttcctttctccaaggatccaaaaatctctggttttccttatctttttcagtaggcggtggtggtggtggtggtggtggtggtgatggtgatggtggtggtggtggtggtgacggtggtggtggtggtgacggtggtggtggtggtggtggtggtggtggtggtgacggtggtggtggtggtggtgacggtggtgacggtggtggtgatggtggtgacggtggtggtggtgatggtggtggtggtggtggtggtgatggtggtggtggtggtggtggtggtggtggtggtggtggtggtggtgatggtggtggtggtggtggtggtggtggtggtggtggtggtggtggtgatggtggtggtggtggtgatggtgatggtggtggtgatggtggtggtggtggtggtggtgatggtggtggtggtggtggtggtggtggtggtggtggtggtgatggtggtggtggtggtgatggtggtggtggtggtggtggtgatggtggtggtggtgatggtggtggtggtggtggtggtggtggtggtggtggtggtggtgatggtggtggtggtggtggtggtggtggtggtggtggtggtgatggtggtggtggtggtggtggtggtggtggtggtggtggtggtggtgatggtggtggtggtggtggtggtggtggtggtggtggtggtggtggtggtggtggtggtggtggtggtggtggtggtgatggtgatggtggtggtggtggtggtggtggtggtggtggtggtggtggtggtggtggtgatggtgacggtggtggtggtggtggtggtggtggtggtgacggtggtggtggtggtggtggtggtggtggtgatggtggtggtggtggtggtgatggtggtggtggtgatggtggtggtggtggtggtggtggtggtgatggtggtggtggtggtggtggtggtggtggtggtggtgatggtggtggtggtggtggtgatggtggtggtggtgatggtggtggtggtgatggtggtggtggtggtggtggtggtggtgatggtggtggtggtggtggtgatggtggtggtggtggtgatggtggtggtggtggtggtgatggtggtggtggtgatggtggtggtggtgatggtggtggtggtgatggtggtggtggtgatggtggtggtggtggtggtggtggtgatggtaatggtggtggtgatggtggtggtagtgacggtggtggtggtggtggtggtgatggtggtggtggtgatggtggtggtggtgatggtggtggtggtggtggtggtggtgatggtaatggtggtggtgatggtggtggtagtgacggtggtggtggtggtggtggtaatggtggtggtggtggtgatgagggtagttttccacattaacatcttgcaaaacaagtagttcaagatcttctccagtttgacttatagtagattgtctatttccagggctacttttgctaagagctgtggaaggctcatttataatgcattggcagaccttctatggtggaaaaggagacgatgtttctcaccaggccgaatctggagtagaaatagctgtgctgccccctgcctcttggtgggggaaggggacttctctgtggtttgatctccctcagaataaaaagttctcctgagtctcgtagctgatctaaccctcaggtcatcctgcagcccttccaggctttcttccggtttcttgctaagacacacccatggctcatttctgtcccgtggttgatgtggctgaacttcagtggttcagtttctactgttcgccctcggcctgtgcctgcctcttatctctccaccgaagtgaaccaatttaagaaaagctttcatttgttaaagtgagatttctccctctttgagttcagggaaaattccaaagagatttacagtgagaaagaagaggaaggtgtttccagcagtgagcagttttgagaccagaagccacacagcagcactcagtgtgactgcagggcagcaactgggttgatctaggctccacaacttcccctttagctctgcagacctcagcacaggcggagcacgagcccttaaccaggaagggatttttgccccattttatcacagtacttagctttttgagcagtgggcaccctcaggagtgacccttctctggacaccagctttggaattggatgtcctcaagcctccctctccaggcttctcagtggggaggtttctgtggtcccctttttagagcttgggaaatctccttttagtttgctttttaatttttccttggcagtaaagccatggcttttggaaacgtcccattggacgatgattcatgaatgccataaagacaggactaaaaggaaagggtcagacctgtgcactctttttgcagaacacattgataaatttagagcaggacagacatccagcctagacgtctatctgtgcagccctaaattcatcaacgtgtcctgtgaaatggggagagaacattttactttgctttgctcatccttttagggactcagtccttttattagattttttccagaaattccttcttgctcatctttgcatggttagtgagtatcaagagaagcacagatgatctctcattaaaggagcacacatcccagcctctgggagccctgactgttgattcacttgaattcttccaggcaataagcattgatgaatcaggttccaaaaggatgttcccaatgccgactctactgagctgtcacacttgctccaaatgcttttgccttgtgacttctgccgcttctccattctccgctctcacatacggctgctcctgcctgattccctagtttggcttcatgtctgccctcactctgatcttaggacctactcagcctcacacagtagtcttgttatatccctgagtttctcagcagcaggtactgttgacatcttgagccagtcattctttggggcgggggcagtgtcctgggccttgcaggatgttccacaccatccctggcctctgcccccagatgccaggcttgtcccacccaagtcatgatgaccaaaaatgggttccctgggggaagaatcatccctggttgagaaccactggtataaccagaggagggctatttctttggctgttgtcatctgaatgtggaattccaaggaaagttggtttctgtttgtttaactgatgaattaagtacagactcccgattaatttctaggaagaaacagcatgcccttatttatttttcaaagagcctttctccgtgtttgcaaatggcctgtgcacatagggtgatgtgaattgcagattctgcctctgctgaccttggctttgaggtactttgtgctcttccaaggaaatacaccatggaaacgtggggtgtgagagtggaagctttgccagcccacatgtgggaggcaggacggatgtgacagtaagcctcatgtctgtatggctccacagagtaacttgaaagcccacaggcagcccctgcctctcatcccctctgccccaccacacacatcacccacatactcaccattcattgtggtgtgaaatctccttgggtgaagagtagatggttgcttattaaaatggaaataagcccagaggctggacgcggtggctcacacctgtaatcccagtactttgggaggccaaggccagcagattgcttgagcccaggagttcgagaccagcctgagcaacatggtgaaaccctgtcaatacaaaaaatgcaaaaaatagtcaggtgtggtggtgcgcacccgcagtcccagctactcaggaggctgaggtgggaggaacggttgagctcaggtgttgaggctgcagtgagtcgtgctcccaccactgcacaccagcctgggtgacagagtgagaccctgtctcaaaaaagaaaaaaaaattaataagcccagaaaggaaagctgtttgtcataaagaccttactttgaatttatgacatgctttccacctcaacaggtacttaggagcaggttttatttgatgaaaagtaggtgggaaaagggtaatgaaagtagcttcgtcgctgggcgtggtggctcatgcctgtaatcccagctactcgggaggctgaggcaggagaatcacttgaacccaggaggcagaggttacagtgagccgaggtcacgccactgcactctagtctgggcgacagagcaagactccatctcaaaaaaaaaaacgaaagtaggttctcaagcacacctcctagaagataaagtgtgaaaaaagagctgagaaagcacagcccgtgagactcaactgccttataaaaacactagcagcacgtgctggcctctcgcctcggctgggttctgtgcaaaaccccatacatttcaccttcctgacagccttgggcaggaggtgtgattgttctcccagtgttacagatgagcaaacttggtggaccccacttcacagttaatccagagctattctctgttagagacccaaggatgcctggttagtttgaaatgtgtgctagctcagagttaattcatattggccctgtggtgctagcagcaggtccaagggcagtaattggcagcatcttgaaaatcattcttaggatccttagtgaaactcccagctcttcctgcttcagagtcaccctgggctcccggggacttcaacacgccactacccttgtgggtggctgacaaggtgaagagaacactccttccccacttttggggtcaggctaccaagccgtgctgcctaagcggctgtgtgtctcagcgaccccagtgcaacagttctgcctggagtggaccctggaggagaggaacagccgagacagcaggcctctccctgcctccccagggcgccatgcaaacatcctccagcctgagaccaccctgcaaataagctccagtcagtcacccagcctgcccgctggccagctctgtctaggtgtgctaaatcctagctgggccaggtgcaaatctcccagccttgccgccacacctacctcatatcgcttgaagcttaatttaggggctggggttgctggagcagcccagtaggaaggcaaggataacacagtttttacttcactacaaatattgcggcaaaaaaacagatgtggggcagtaactcaccccgtcgcttggtccaggggtaactgcctgcagccccagccgacatcctggcctttcaacacggagctgtgactgacggccctgcgtgcgtggcttccgtgctctcagctccgcttgctcggtgaggtggacgtgaggggacaggggctgtccccttgttgctgcctcattgccagccgtgcaattcccacccagggcttctgttcggggtgtttcagggtttacagttgggtaactcgttgttgtctgctgtgcctggcttttcaatccaataggcctgcaagtcctccgagattcctcctcctaaccagcccggagttccccagggccgtgcccctccccagagagggccctcggagagctgctcccgcattgtcatgttgactgacctttccttctttttgtcttttctccacagtgtggcaaaggagcagagaactttgacaagttcttcacacgaggacagcccgtcttaacaccacctgatcagctggttattgctaacatagaccagtctgattttgaagggttctcgtatgtcaacccccagtttgtgcaccccatcttacagagtgcagtatgaaactcaccagcgagaacaaacacctccccagcccccagccctccccgcagtgggaagtgaatccttaaccctaaaattttaaggccacggccttgtgtctgattccatatggaggcctgaaaattgtagggttattagtccaaatgtgatcaactgttcagggtctctctcttacaaccaagaacattatcttagtggaagatggtacgtcatgctcagtgtccagtttaattctgtagaagttacgtctggctctaggttaacccttcctagaaagcaagcagactgttgccccattttgggtacaatttgatatactttccataccctccatctgtggatttttcagcattggaatcccccaaccagagatgttaaagtgagcctgtcccaggaaacatctccacccaagacgtctttggaatccaagaacaggaagccaagagagtgagcagggagggattgggggtgggggaggcctcaaaataccgactgcgtccattctctgcctccatggaaacagcccctagaatctgaaaggccgggataaacctaatcactgttcccaaacattgacaaatcctaacccaaccatggtccagcagttaccagtttaaacaaaaaaacctcagatgagtgttgggtgaatctgtcatctggtaccctccttggttgataactgtcttgatacttttcattctttgtaagaggccaaatcgtctaaggacgttgctgaacaagcgtgtgaaatcatttcagatcaaggataagccagtgtgtacatatgttcattttaatctctgggagattatttttccatccagggtgccatcagtaatcatgccactactcaccagtgttgttcaccaacacccacccccacacacaccaacattttgctgcctaccttgttatccttctcaagaagctgaagtgtacgccctctccccttttgtgcttatttatttaataggctgcagtgtcgcttatgaaagtacgatgtacagtaacttaatggaagtgctgactctagcatcagcctctaccgattgattttcctcccttctctagccctggatgtccacttagggataaaaagaatatggttttggttcccatttctagttcacgttgaatgacaggcctggagctgtagaatcaggaaacccggatgcctaacagctcaaagatgttttgttaatagaaggattttaatacgttttgcaaatgcatcatgcaatgaattttgcatgtttataataaaccttaataacaagtgaatctatattattgatataatcgtatcaagtataaagagagtattataataattttataagacacaattgtgctctatttgtgcaggttcttgtttctaatcctcttttctaattaagttttagctgaatcccttgcttctgtgctttccctccctgcacatgggcactgtatcagatagattactttttaaatgtagataaaatttcaaaaatgaatggctagtttacgtgatagattaggctcttactacatatgtgtgtgtatatatatgtatttgattctacctgcaaacaaatttttattggtgaggactatttttgagctgacactccctcttagtttcttcatgtcacctttcgtcctggttcctccgccactcttcctcttggggacaacaggaagtgtctgattccagtctgcctagtacgttggtacacacgtggcattgccgcagcacctgggctgacctttgtgtgtgcgtgtgtgtgtgtttccttcttcccttcagcctgtgactgttgctgactccaggggtgggagggatggggagactcccctcttgctgtgtgtactggacacgcaggaagcatgctgtcttgctgcctctgcaacgacctgtcgtttgctccagcatgcacaaacttcgtgagaccaacacagccgtgccctgcaggcaccagcacgtgcttttcagaggctgcggactttcttccagccattgtggcattggcctttccagtcttgggaggagcgcgctgctttggtgagacacccccatgcaaggtcctcagagtagccgggttctaccacaaacagaaacagaatgaaagtagctgtcagtccttgtagagagccgctctgtttcctcccagaagcatctcccagctaagctcgcattatttttctcctctggctgtttgcctgaagttcacagaacacacaaccatgaaaggctttttgaggtgagaggcccaggtggtcctggcaaccctgagtagaaggagagacggggtagggaacgggcccggccagaaaagaaccatttcttctgccatcttttatgcaccatagacatcgagactccagggggtcctggctcccctgtccctgcagccctgcaggtcagtgcatgatctgggttcgtgtcctgaccaggtgctcctcctttgatccgaggggaaagggactggtttatagaaagagcctaggagacaaaagggccagtccccctgcccagaatggagcagcagcaggacagacccccacgaggccccccagagaggaggaagatcccacggaggaacacatgaggttagggacccttgttcagcaccccaaacagcctgcctgtttaaagcaggcagcaggcttaggccttccctgcaaccccaacacccacaagtttgtttctctaggaaacacattcactgtctcagctggctgttactctctcagaccatatggcaaagttttccaagaaaatgccccgacaggggtgcccagcacactgcctgagggacaacagacatcagaacaaacccccagagagaaacagtcaaaatcagggcccggtgcagtgttgtcatgtggaacctgctttatccattgctgagtgttgaatgtgggtaatggttagggctttccagatctcagcagccaaagacagttattgttggaagactgtcatgtagataaccatgagcaatggctcgcctcagaatcagttcataaaattctatggtactggccccttcgtgggtattgtgtgaaatgagatggtggcgaggggtgcgctgtggaactgccgcagccacgcaggaggtccctgggggatgctttgggaagtccttgcccctgagcactgcctgattgccagggcctgtggaggtctaggccgcctggcagaatctagcaccgtccgaatccccgcaggacccatggagctatgaccacaccaggccattcaaatggctctgcattatcttcccttggaaggtggccactcctcggtggcagggcctttccctgaggctgcaggccgtgggctggcagcccgtctcttggcatttcaattgaaggtcaccaggtgctgggtttgaaaggaagtcactggagtgctgccaggggccgccctccaaggttaatgagaggcccacatccaggcaagaactaattcaaaaggcagatcagaaaccacaggagtcaaaattattgctccggcagtgcttcccttcctttcatccactggcctcgtgtggtccatgcagggccactgtctgccctttctgatgccacgtattaggctttcttactcagaattttgatagaaaaccatggggccaagagctctggaagcctggccggaaagaccaaggttcatgcagcccaacaaatgattgttgagcacctctcggagccaaagtccttaggcgagtgtggtgacttcctggaaggaggatgcagacttccagagagcccccccaacggacgtgctgagaagggagagggaggcgggggctgtagtcaggaaggagccagagaagaacagggtttgggtgcatccagaaatatgcctgcagtaggagggagaggaaggggtgccaccgtcaacggcttcccatcggaggtggttggtgcagatggaagtttctgtctgctggccctcaagagagtgttttgccagggacacagtctgttcctcctcagaaaacaccccccaaatgctaacaacatccccaccagctgctagaagcccctttcccctccccaccttgaagtagctcatagttctctgggcagagccagaccatccagtgtaccccagaggccagtaggttcctgcccattttcctctctggcttcctgccaagaattatggcagctgaggatgaatggagaagtaaaaacaactaacaccgcacaactaacaactaacaccgcagttcccacctgggttccacttagcaggagacatttcggagggttttttttgtttttgttcctgttttttttttttttgctggaatttgttttctcagtactgaaaagagaaaaagtgacaatcttgtatttttaaaagcctcggaaaggtgataccatctgacagtcattttctcacgttggtcttctaaagtcacctatttcttgtgtgtgcacatcacaccatttcctgtttctttataacccgacaagggtaggagtgcctgtttcccctgctgggcacaccagacaatcgtaatcacaaaacagacactgagccaggggcccaaagggtgtgatcatgagagttaccgggacagcagtaggcatgacagtcaccaggaaggacaagggtgctctgttgttagtggccacacaccaatttgacaaggagtgttgcgaaatttttatttatttatttatttattttgagatggagtttcactcttgttgcccaggctggagtgcggtggtacaatctcggctcactgcaacctccacctcccaggttcaagcgattctcctgcctcagcctcccaagtacctgggactacaggtgcgtgccaccacacccagctaaattttgtgtttttagtagagatggggtttcaccatgttggccaggatggtcttgaacccctgacctcatgatctgcctgcctcggcctcccaaagtgctgggattacaggcatgagccaccacgcccagccaaaatatttttttaaagtcattttccttaagctgcttgggctacatgtgaaatacactggacggtcaacattcctgtctcctcccatttgggctgatgcagcagatccagggaatgttacctgtttctgctgctagaagatccaggaaattgggaaggttacctgacgcacacatggatgaaggccatcatctagaaatggggtcaaccacaattgtgttaattccgtagtgtcagggattcttcgggaaggtcaacagtatgaaggattctgacccctgtgcctcccatttatgtgatcaggtgacagttaataaccgtggaggtcacactcagccatccaacagccttacagtgaccctacacaaaagcccccaaattccaaagactttttcttaacctaaaggaagaaattatttgttaattccagtagagcaactgaatatactgggctatttgtacttttttatagagaactttaataataattctttaaaaatgagtttttagaacaaagcaactgacgatttcctaagattccaatgccctggagcttgtaggaggacttagcctgggtcagctggagcacccccgacctgatctcccactgccagattttcccatgctcctagggtatggagtccacgtgggaatgactgcaagttcaggtggaacttggccgactgatgctctgcgagtttttaatagacactggggacaactgcttaaggtttagaaacttccaaaccacaggaaagacatttttagtgtcccccatccagaggcagccctggaataggattcccaggggtttctgggacccctttccttgctccgtgaggctctgtggccatcttttggcaggaggaggatgcttccttggctctgtgcccagacccgcctggtccccaggtctctcaccttgggtgaagattcagagatgccctgtaaggattttgcccactgggcaactcagaaatacttcgatctcccaagatataagaggcagcagcaaacgtgcctattgacgtctgtttcatagttaccacttacgcgagtagacagaactcggcttttcagaaaataggtgtcaagtccactttataagaacctttttttctaaaataagataaaaggtggctttgcattttctgattaaacgactgtgtctttgtcacctctgcttaactttaggagtatccattcctgtgattgtagacttttgttgatattcttcctggaagaatatcattcttttcttgaagggttggtttactagaatattcaaaatcaatcatgaaggcagttactattttgagtctaaaggttttctaaaaattaacctcacatcccttctgttagggtctttcagaatatcttttataaacagaagcatttgaagtcattgcttttgctacatgatttgtgtgtgtgaaggacataccacgtttaaatcattaattgaaaaacatcatataagccccaactttgtttggaggaagagacggaggttgaggtttttccttctgtataagcacctactgacaaaatgtagaggccattcaaccgtcaaacaccatttggttatatcgcagaggagacggatgtgtaaattactgcattgctttttttttcagtttgtataacctctaatctccgtttgcatgatacgctttgttagaaacattaattgtagtttggaagcaagtgtgtatgaataaagataatgatcattcctttgtgtagttggccttatttacatccctttgcggtatggcaattatttttcctccagtgttcaaaaaatagcatttgacttcagacacactccgcagaacactttcatctcttcacctgtttttcaggcatgaccctccatttatagtggcattttttttttttttttttttttttttttacttaaaaaatatatcttgctttgaatcaaagcccagacagtgactgggatggcgttctggcaggtcctgcgttcattcattcatgcactgttcacagagcccctgcttagggccaggagttgtgtcaggccctggagaagaagaggctggcatggcccctgcctgcacggagcttacagtcttctgccccaaactgcaagggatgcccagcaactgatgacatcatctaaggctggatggtgcccttcccctggaaggaacgattccagaatgaattctgctcaagtctggagatgttttctccaaaaataggtatttttcacacatcccgttggccacactgtggatgcagcttcaggaccgtccccactctgagtgtcagccgcctcgttctgcatttattcacggttgaaaaattgggggaaatgttcaaatgtggaacattcaaaaatacccagcacttaacaactcaacgcaatagagggaattgtcctcaaaaagaattaaaacaggctgggtatggtggctgatgcccataatcccagcactttgggaggccaaggtgggaggatcacttgaggccgggaggtcaatgctgcagtgagctacgattgcaccactgcactgtagcctgggtgacagaaggagaccttgtctcttaaaaaaaaaaatcaacaacaaacaccaaagccaagatccaaccttggtaaagtcaatctttgctgatttcctcacctccttttggggaatgctctcccctcgtgctcatggcttcaacccactgctgccaccctccctcccatagccccctaatcctgcagccgcccagcccagcctgttcctcccagcacactctgcatccacacacatgcctccctgcgttctcttccctctgggccttgctcccagccagattactcgagtgtcagcatcctctcagtggatttttccctccctaagatgccgcggtcacactcaacctcctggaagtgaaggctctttcagctgccaatgcgagggctggcggggaagctattttgaagaaaaacaaagggcaattttcaggtcttcagagcaatgtggtctctgccccactgggctggccctgaccttcactccgggctggttgacctcacatacgtgtgtagctgtggctattcgtcacgttacgttgcccagcagagtagcttaccatggccattgagcatgccctctgcttccgccagtgtgctgttttatttcatttttgctgcaatgcggaatgaagcagagtgggccaccaagcagcatcctcacaggcagctggtgacccgaggaactgagtagctccacccaagtttacccctgcagggaggtctcgggtgtatccaatatggctggtcctcccggccccacagaggcagcagggacaacctgagcaccaggcagtggacaattgctcttccaggggcactgtgcgccacccaaagtggatgctcaaaaacgagtccttctgtccagtactggcctccctgtcacatgcccaccatgcccatcaagttcatgagcaggcactgttggggctactctaagtcagggttctcggccagaggccatgtagccacccacggggcacttggcaatgcctggagactgttttggttatcataactagaaggaagttgcattggcatcgagtgggtagaggccaggggcgctgctaagcatcctgccatgcacaggatacccccagccctcaacaaggtgtcatcccacccaaatgtcggcgctgctgctgttacaaaccctattctaaaacacactccgagttccccttctctccatctcccctgttctttctctctggcctccttgaccctcatggccctctctgctcagcagccagcaggaccttgcctgagcaggccccttccctgttgaaagccctctgtggctcccatcacccagccttcctcatggcctttcatcctcacatgcccagctctgggaccaaggattcaatggttggggagagtgagttctctctctctctgtctctgtctctctctctctctctctctctctctctgtgtgtgtgtgtgtgtgtgtgtatacgcacaccctttcccatgagaatagaagctctaagaggagccggcttgtccatcctgtttgctgctacatcccagtgcctagagcagagcctggtagataataggagctcaaaatgttcattgaatgactgagtcaattaatcgttcccaaaactgctctgagcctagcaacgtgttccagacacccttactgggccatgggatttgccctggaggtgttcacacactaatgaagtagataagatatacaaaaaagaactaattaaagatcatctctcaaactcatgatgagcttcagcctaggaaacaccagttctcaacctctgtccttcagcccagaatctagaggcgatggctgcctatggttacacttgagtgattatttaactccctgagcttcccccctgcccctggcttattgtgtgctctggggatgaaattatggttcagctaaaatgctaatgcacacgggcaaaggccaaggccatctattttcacactctgtccccatcctgggagtgcacatcacagagagcagggcattgcctgcagggagtgggtgagaagtgcttttggctctaagaaagcagaactggatgtctccccaagattctttttttaacaaagctaattcaataaatacattgcaaagaggcctattctagccataaggggagaaagtggaaaatggttctagtgaaatgaaagagctagtggtgggctcagggactcaacagacaggtggaaatggcacaaaccaaaagtctaaagggggctgtaaatgggaacgcgcaaactgtgcacgcacacacacacgaacacacatgcatacagagatgcacacacacacatgcacacagacacgcaaacacacgcatgcacacagacacatgtgcacacacagaggcacacacactgattgattaccagaagtgtaccaggcactcttctaagttctttatgtgcatttatttcaatcccacaatgacagcccctgcccccagataggtgctgtttactgtgcccattttacagaagaagaaagggaattccagggaacttaaataacaacacataggtgaacaacaccagacaaatggagccaaccgaaagagcagagatgtgagcacgccagatgccttcctgggggaggaggcagggaggctgaggtctgatggaaaggctggaaaggagaggtcccaaacaagcagacaccagcacgcagggaggaggggaagggctggcatgcgcgcagtgcctagcttgtcatctgaacacacccatctcatttaatcctcatgacacctccatgggctggaggccattgttcacatctcacagatggagaaactgaaccccaaagtaattaaccagcttccagatacgcaactcctaagcagcacagccaggctgggcactgagtctgatcttcctagccttgtcccatgagagggtcagatgtagcattgggtagggagcttcagggccagaccctgttggggaacttctccccccactgtggtttcattcaaagtccatcctattaccaagggggatgttccttgcccttagctgactctgatgcctatgagactagatgccctcctggaactgtttccagaaggctttcttccaccatcaccctccttctctcgacattttttttttttttggagctgtctgggcgtgggaggagagagaaaaatagcatcacagttctcagaacacagcaggtgcctctgcagccgccctcacctgactgacttgcctggaaggcccaggaggaaggaggaagcgggcaggaacggctggtgggccccaggctccccctcccaccacaggacagccctacattgagaccccagctccacctaccccaggagtcaaaaacaatccaaggcaagcatcatccagtgagcagaacaacttgtgagaaatcactgatttcttgggggcactgggcagcccggggaggaaaggttgggcttggttaggtcagaatactgtgggaatgcttctgggtttttggaaaatttacaaaaaataacacctgcttattgtagctaatacagatgaggaaaagaaaatcccaacttcccaagatggttaaactttttgattccttgctaactttatttattattcatcatcttgttatcttttcaagactgtaccatggtattagcctgttttcacgctgctgatagagacatacacgagactgagtaatttacaaagaaaaagaggtttaatggactcacagttccacgtggctgggggtggggtgctcacaatcatgatagaaggcgaaaggcatgtcttacatgacggcagacaagagagaatgagaatcaactgaaagggataaccttgataaaaccatcagatctcacgagacttattcactgccacgagaatagtatgggggaaaccgcctccatgattctattatctcccactgagtccctcccacaacacatgggaattatgggagctacaattcgagatgagatttgggtggggacacagacaaaccatatcaacctcaaagccctcttatgagactccactgggccttgacattggtcactgaaagctaggatcacagatgttaacacacacatcctttaaacattttgttatgactttttttttttttgaggcggagtttcactttgttgcccaggctggagtgcagtggtgtgatcttggctcactgcaacctccaccccccgagttcaagcaattatcctgcctcaacctcccgagtagctgcgactacaggtttgcatcatcatgcccggctaatttttgtatttttagcagaggcgggttttcactatgttggccaggctggtctcgaactcctgaccttgtgatccacccgcctcagcctcccaaagtgctgggattacaggtgtgagccaccgtgcctggcctttattgtaacttaaaagccaataaatgcatgaccattcagtaagggtggggacttctctctgagcagggaatttctttcttgcattaactatacccataatacttgtcttacagtttccagttagggtttattcgaagagaagccagatattcacaaagaaagctgaatgcaaagtccatttagattgttgcaatatttcttaatcttttacagttgccttgcccacaactgtctctgtagctgtttttaaaaactcgttattctttttcttaaacattccattttgtgttcactgaaacaactctatgctttgcacttgtatttcattggtttatgtggaatttgattaattacttaactacaaagcaacgtagcagacattcaatgttttgggaatgaaattgacattttcttactaattcccctattgttggaattttaggttttcctggtttttaaattattttgaaaactcattgttgaacacctttgttcccaaaattttgaatgcattttagattatatcttccactggattcctggaaatacaatagctgaacttttttttttttttttttttttgagacggagtctcactctgtcgtccaggctggagtgcagtggtgcgatcctggctcactgcaagctctgccattctcctgcctcagccttccgagtagctgggactacaggcgcccgccaccacgcccggctaactttttatatttttagtagagacggggtttcaccgtgttagtcaggatgatctcgatctcctgacctcgtgatccacccacgtcggcctcccaaagtgctgggattacaggcgtgagccactgcacccggccaatagctgaacattttttagactcttggtacttcttatttcctgtttttcttcttgaaccctgttttcttttcttttcttttttttttagatgaagtctctctctgtcacccaggctggagtgcagtgatgcagtctcagctcactgaagccttcgtctcctgggtttaaacaatccttctgtcccagccttccaagtagctgggactacaggcatgcaccaccacgcctggctaatttttgtctttttctggtagagtcaagatttcatcatgttggccagaggctggtctcaaactcctgacttcaagtgatctgcctgcctcggcctcccaaagtgctgggattacaggcatgagccaccacacctggccaaagccttgttttctatggtgacattttcttgctctcagatcaagtagtaacgagtgtttcttttcaatgtcatgctgttcttagttggtttgttatcaagtgccttcattcggtcaacaaatatttatgtgagctttaaactctgcaccaggggttcagtgactaccagggctcatagccaggagtgtttttgatttttgcctctttttatagatttttaagtggctttcaagtaaaagacttcaagtgaataatgaaataagagtacatcaggacgaaggtcaatacaaatatcttgccatgatttggatatggtttgtttgtccccaccgaaactcatgatgaaatttgatctccattatggcagtgttgggaggtggggcctatgggaggtatgtgggtcatgggagtggatttctcatgaataggctaatgtcctcccttaggggtgagtgagttctcactctcaagggaaaggatattccatgaagagtgggttgttaaaaatagtctgagtctgacttcgttgattttgctctcttgcgtcctctcttaccaagtgatctctttgcacatgccagctccccttccactttcaactcccccgccatgagttgaaccagtctgagtccctcaccagatgcatatgccaaatcttgaactttctagacaccagaattataagccaaattgcttctttataaactactcagtctcaggtgttctgttatagcaacacaaaatggataaagacagaaaactggtaccaagagtggggtgttgctataaagatacctgaaaatgtggaagtggcttttggaacaggataatgagcagaggttagaagagtttgaaggaacaggcattaaagagattgcattgcttggagtggagcattaaggacaattctggtgagggcttagaagataagctggaacttctaagagactggttaagtgtttatgaccagaatgccaatagaaacgtggacagtaaaggccatgataatgaggtgtcagatggaaatgatgatgacaccaatgcttaccacttaggctctttggagtggaggcatgagtcgaacctggggctgcttgagcaggaagcagtcacaaagcagtgcagggctggggcatccatgtccacttggtactagttctgcaggccaggtgtgcagaaaccaagagtggtagaagtgtggtggcttccacctagatttcacagatatatcaaaatgcctgggagcccagggagaaacctgccaccacagacagttctcactgaggcaatgcctagtgtggagcagggtcaccattgggaccccagaactatagagccattggcagcatacaacatccatctggcaaaaccacaggcacccaactgcaacccatggaagtagccacatgggctgcacccaacaaagacatggcagcatactagacataaaggcctgaggcctttgcaagcccagccctggaaccagcgcctccaggttgtgggacatagagacaaaggagattattatgaagctttaagatttaatgtttggccaggtgtggtggctcatgcctgtaatcccagcactttgggaggctgaggcgggcggatcatgaggtcaggagatcgagaccatcctggctaacatggtgaaacctcgtctctactaaaaatacaaaaaattagccgggtgtggtggcgggcacctgtagtcccagctactcaggaggctgaggcaggagaatggtgtgaacccaagaggcggagctttcagtgagctgagatggcaccactgcactccagtctgggtaacagagtgagactgtctcaaaaaaaaaaaaaaaagatttaatgtctgccctgctgtgtttcagacttgtgtggggcctgttactcttttctattggcctatttgtctcttttgggacgggaatatttaccaaatgtctgcgccactgttttgtcttggaagcagataacttgctttttattttacaggctcatagctggaaggagcttgccttaggtctcagatgagactttggacttttaagttgatgctgaaacaagtcaagactttgaagcctattgggatgcactgattgtatttttcatgggaaaaggacatgagtttcatggggccaggggcagaatgctgtggtctggatgtagtttgtcctcaccaaaactcatgttgaaagttgatctccagtgtggcagcgtttgagaattgggagccagtgcgaggtgtttgggtcatggggcagatccctcatgaatggcatggtgctcttctcaaagtagggagtgagttctctcaggaatagattagttccctcctgagcgggctgtgtgaaagccaggatgcccctcgggttttgccccttttcaggtgtctgcttcccctttgacgttctgccatgtggtgacgcggcacaaaagccctcactgaaaccagggccatggccttgaacttctcagcctgcagaacaataagctaaagaaacctcttttctttataaatcacccagcctcaggcattctgttacagcaatattaaacaaactacaacacatcccttttccgcaagagtcaacaaaattgctgttgttgattctcaaacttggctttgcattttctaacagccaataaaagtgggaaccatggtcacttatgtgattgtcattactggaaaagaggaagcatatgtgttcctttgggaaataaagcttttcctagcactgaatccaaaaggaatttcttgagtataattttattacctagaaaagacaccaagcaatatcagaaatgatgtcctcaacaacattttgaagttttgttgaaacaataaatgcactatcaaatttcataaagcctttttttagtgttcttcgtcaagtttggggcatattaaaatacaacttcatgaaggtgaccgaccaagaaactcaacccaagtctccaggtaaataaccaattatctagtccaacttggtccaaaaaaagaatttagaattcctggaggaaaagaacaatgaaataccatgtttttatctgttaacttggcagaaaatatgctttcttgaaagattaaatcccaattttggcaagaattgggaaagtctgccctctcatgccctgtgggtgggaatataaattggtacaatcttttttagagggcaatttggcactaagtaacaagagtcttaaaaatgtgcttacacacagcaattctgctttgggggatctttttcctctaaagaaataaccaaaaatgcaccaaagacttaggtacgagatgtttgttttgctccgcctctttgggtggcagtaaacacagatggacccaaccaggggctggcgctggaaatctctggagccaaggcagttctgggctggaaatctctagagccaaggcagctctgggagatggattttttttctctcactcatgtaagctcctcagcctctttctctttttggaactttttattttggaataatttaagactcaaaataatttgccaaaatagttcccctgtacccttcgcccagcttcttcaatgataacaccttacttaacattagtacattattaaaaccagaaaagggacacagtagaatttttttttttttgagacggagtctcgccctgtcacccaccaggctggagtgcagcagtgcgatctcggctcactgtaacctctgcctcctgggttcaagcaattctcctgcctcagcctccggagtagctgggattacaggagagcaccatcatgcctgactaacttttttgtatttctttttttttttttaaatagagatggggttagaatactcttaactaaactataggccttatttgaatttcaccaggttttacatacacaatacactcattatgtgtgtgtgtgtgtgtgtgtgtgtgtgactatgaaatcatatgtatagattcatgtaaccaccaccataatcaagatccagaactcttctatccagaaagaaattcaccgatgctacccctttgtcatcttgccccaccccccaccgtagcccctggcaaccacagctctgttccccatcactgtaattttgtcatttcaggagtgtgatataaatggaagcacacaggatataacctttaacctcctggtgcatttcttcctccccagcctgcattttctcaaaaggtcaaccgaccacaacttcttctggcccctccttagcctctgatcatgcttttcacatcagcgtccattgatgagtgggtctcacctggtacttttgccctgagagagggaatcctatggcccggtgcatgtgtgggtccggccatgtcatcggtcactgacaagttggctggatttactgtcaggggtcaggctcccatgtctggtccattcatctgtggcggagcggagcaagctgtttgacacaaaacagggccaccttgcccatcccgtcatcaaagagatgaacaaagggagatcccttctgagaagggctctgctaggcggatgctttaactgctatatctacttcacaggtcattggaaagagcctaaattcttgctaatagaactccagtttggggctgatttatgataaccatgccctccctggatcctccagggccccagggcatggatgctcttgggcataagcccgtcatgggaattccattttccttaccagtggctggtttaggcagagcctgtgagacacaacgagacccaagtgagaactccgaggagccattcttggcctccaaaagtcctgtgggaatgaactggagatcagctcgacatcaaagagctcccaagggtttctcaaataggagatagcatcattctgtgtggtttctccagagggccttactcagggaatattggacagaaaaccgctgctgtggcatgagcagtttatagcaaaacaaaacagaacaaaaaccagtaactatggagagaagacaaacggccagagaggagatgccgggaaattttattagactaaaaaaatgcagtgtaatcattttgtgagttgactccaaaggccccacgtggtttctatgcctgggaaggttctaatgccttccccaggtacctggtactcgaagcctggtgtccccaggctttgctgcagttccaaaggaacagaacactgtcccctcgtccagcagcgttagcccacccagggagtggacatcgtcctcacctatcagtggggtgactatataactaactgttatatatataactatattccaaaccaggacaggtgtgaaagtacaagagagagccattaactctcccggggtcatggtcatgagccaggaccacccaaagcagctgtagggtcacccagcaagctgcctcactgcttctggtaagagccctgccacctgcccaacctcccctcaccttttgggagatgcccatccccttctctaagcttgtgactctgatatcatatctatttcagggcctctcaacctcgacattgctgacatttgaggctgcattattctttattgtgaggggctgtcccatgccttgtagaatacttaacagcatccctggcctctacccactagatgccagtgataattcttcccacagtgcctctggacattgggcaaatgtcccctggggagcaaatagctctaatcccatccttctggcccaggtgtgcctctgggttaaagcttccctggacagttaatggctttctaatcttggggcctagagagactgagtcacaaggcagggcaggaggccacctatgagaatgggcaaaatggggctgtggagaacccctcaagaagggggagaaatatgttctttttttccccaaggttgtttctagaatccctgctatgacatgcaggggctggtgtctccataggagaccatccaagcctcccaaccaaatgacctccatgcccctggagaaccaagcgggggtacagtccagaaacatgttgcacctgcagtgggaagattgtagctgggtcacccccaccccactgggacatgccaggcacattgaatgaatgaattccagtttagtcttaaactcactgatggactctgtgtgagtgcatttaatttctctgatttttaatttgctcactggaacaacaaagaaaagattgctgatctgccttacatgggtgcagggtgaaatgacctcctccagcccattctctcagaggccatttaggagatccagaagcatctattggcggatggccactgctggttactgcggggtctttgtaaggaaagtgaggcctggagggagagggccactccatgagtacaatagggactaacctgctgtttcaccaggagcatggtaagagtagcaagtctcagtcctcatgtgacaccagaccataatgtccttggaagaaaattaggacttggtggagtgagacactttgctcttaagtaactaaaaaaggggtgagggtctgtgtctttcactagcagggaaattcgtcaggattcagagccaggggagatgttttcccatatcaatagggccatacccccatgcccgcttgctttgaagccagcagatagatgtgtaggcagaaaaaagtctcagttaacatctagcccagtggttttcacccactggtaactctggcaattaccaaccttggcaacatctggagatatttttggttgtcacagttgggaaaggggtactactggtatctagagggacaggggccagagaggctgctaaccatcctgcagtgaacagggcagcaccacgacccccatcctgtcccgcccccatcaatgatacatcaatagttttaaggttgagctgggtgtggctcatgcctgtaatcccagcactttgagagactgaggcaggcagattgcttgaggccaggagcttgagaccagcctgggcaacatggtgaaaccccatctctactaaaaatacaaaaaaattagctgggtgtggtgatgcatgcctgtagtcccagctactcaagaggctgaggtgggaaaatcacctgagcccagggggtcaaggctgcagtgagccaagattgtgttgctgcactctagcctgagtgtcagagtgagaccttgtcaaaaaaaaaaaaaaaaatgtcttgaggttgagaaaccatgataagactgggacactagggtttgtcctccatccccgggaatcccatggggaaagctgggggtctccaccctccccccacccatgggaatagaggcaggggttagaggtcgtatctcccgctcctctgaggttgtcttgagccatcagtggaagaattgcttgaccccattgcagagtccagcactcatgaggtctagggaagacaccgaatggtcctgacccaggccaggaacttttgactatggccacaggggctggcactgggcaatgcctacagactcacagaagacacctgaccaggtgagatctaagctagtatcccccatcctccctttctgggtagggtggcacctcccttcttccccccgggggggccacagaggggccccagcatgcccaggtgactcattaccaggttcatcaacagcacccagaaaacgttcttcctttactattccctccctgcatctcctgtgattacacactaccaacacctgctcccaggacggagcctggcactttagcagacaactgtgaatgatctagaaacacgaccctccccgcagggatttagaattggatatgcactaaaactcaaattataacaggaatcatttgctactttgggccaggccttgtgctgcacactttgaatacagcatctccctccttctctcaatagcctctcaaggtgggtattataagcattatgcccacttttcaaatgatgagtccaaaacttacaaggattaagtaacttaccaaaggttcttggctacagtggcagacaaagatgagatgcaacctgagacccagctgactccaaggcacatgctcctaatccttggtgagcctccgctgggactgctccatcagtgagttccaggtaggcagaggcgctgcttcccagtgactgaagctcctgaactcatccctctggctgcaagcagcgttgccctctcaactcgggggccctccataactgtcattgtcttgaacaagagcaggatcacagcctgtgctaaactttctcctataaaagcaaactctgacaggaaattttaggcacttcccagtagatggtggtggctgaggagctgggaatcttttctaccacactgtgggagcagaatctctggtcttcataagtgatggctgagcgatgtgtcaaccttcattgaggcttccagaagctagaggcttccagataactggagccaggcccgttttcttttatttatttatttatttattatttatttatttatttattattatactttaagttttagggtacatgtgcacaatgtgcaggttagttacatatgtatacatgtgacatgctggtgcgctgcacccactaactcgtcatctagcattaggtatatctcccaatgctatccctccccacttccgccaccccacaacagtccccagagtgtgatgttccccttcctgtgtccatgtgttctcattgttcaattcccacctatgagtgagaatatgtggtgtttggttttttgttcttgcgatagtttactgagaatgatgatttccaatttcatccatgtccctacaaaggacatgaactcatcatttttatggctgcatagtattccatggtgtacatgtgccacattttcttaatccagtctatcattgttggacatttgggttggttccaagtctttgctattgtgaataatgctgcaataaacatacgtgtgcatgtgtctttatagcagcatgatttatagtcctttgggtatatgctcagtaatgggatggctgggtcaaatggtatttctagttctagatccctgaggaatggccacactgacttccacaatggttgaactagtttacagtcccaccaacagtgtaaaagtgttcctatttctccacatcctctccagcacttgttgtttcctgactttttaatgattgccattctaactggtgtgacaggcccgttttctaagaggcctatttgccgtgcccaggtggagtcccacttcctataaccaagctcagatgaatcctacatagctttgctggttccagaaaggcagctggagcctgtggcaaagcaacattgcttggatttcagcagcgggtgtttcctacctgggggctcaccatcccttgccatttcctcaggaggcttgcacaaaaccagtgtcataggctccatacccactaggatggctagagtctcaacaaccaaccaaacaaggaaaataacaagtattgatgaggatgtgcagacactggaaccttcctacataattggcgggatgcagtcactatggtcaacagcctttccattcctctaaaagttaaacatggggctaccatatgacctagcaattccactccaacatatatacccaagagaagtacaaacgggtgttcaaacaagtacatgtacaccaatgttcccagcagcactattcacaatagccaaaaggtggaacaactcaaatgttcatcagtgtatgaatggataaacaaattgtgacacacacacacacacacacacgaatattactcgatcagaaaaaagggacaaagtcctgatgcatgcttcaatgtgaatgaacctccgaaacttatgctaagtaaaagaagccagatacaaagggttatgtatgaagccatcctccttacatgaaatattcagaataatcaactccacagacacaggaagcaaattggtggttgccggcgggggacaatggggaataacggcttaaagagcatggatttccttttggggtaattaaagtgttttggaactagatagagatggtagttgcataacactgtgaatgtactaaatgccactgagttgctcaatttaaaaggttaattttatgttatgaattcatgattttatctcaatacaatttgtttcttaattaaaaaaaattagcatcatagttacaccagcctgggcaggcggctggacgggtgcattctaaaagtattgtattcttccttaagctctacaggacagctgtaccggttgctttagtaaacaacatttgccccttcttccaatagctgtctccaagtttctcctgaggacctgttcccatcacactttccagtccagacgccagtgatctgagtccattcattcactttcctggttttctgtcacttgccatcgaaacagtcctgactgatacagccatcttcaatgtttccgtggagcataccctagtttttgtttaatttcaagaggccattgagagatgttcaagttgcaatgtgaaaattctagcttccaaacctctacttcaatctggacagaaaatttcaagtttcaagttacatttaaaatgttttctatgatggtgataatgtccatgtacttaaagccaataaactacacactttaaaaatggttacaaaggtaaattttacgttctgcatattttaacacagtataaaaaataataataaatgttattttttctgactatatgatcatggtaaaaaaaaaaccttgagccatataggaaagtatgaagaagaatataattatcacccacaatgtctgtttcagggctaacaactgctaacactttggtatatttccttgtagtctttttttatgttttacagtgtgaaatactgtgtatatatacacactgtgaaaaatgaaaagaactattgttgtttaccctgaaacagatattatagatgataattatattcttcttcatgcttttctatattgctcatttttttaccataaacatatagtcacaacaaataacatttcttatttttttacacagtggtatatcagtggtatatatatatatatacacacacacacacacacacacagtgaacaataaatgaaatgaaaaaataaattatatagttttttgccctgatttttacttaacattataccatgaacattttttctacctgtaagttaagtattagtccgttttcatgctgctgataaagacataactgaggctgggtaatttataaatttacaaagaaaaagaggtttaatggactcagagttccacgcggctggggaggcctcataatcatgatggaaggtgaaagccatgtcttacatggcagcaggcaagacagaataagagccaagcaaaaggggtttcccttataaaaccatcaggcctcgtgagacttattcactaccacgagaacagtatggggaaaccgcccccataattcaattatctcccactccatccctcccgcaacacatgggaattatgggagccacaattcaagatggaatttgggtggggacacagccaaactatatcaattgtgattgaaacttaatttttagtggctgcataatattccatcctgtgggtgcaagatacttaagctaattaattccccaatggtagatatttagagagtctcctattcgtctccatcataaaataaaatgaagatgaatattgatatttagattcctagaagagggataggaacaattgcaatgtttttggtccaaactgcagataccccacagaaagtacccatagaatcacccttttctcaagccttaatcactgactgaagccttaatcactgaccaccagcctgggatggcagctggtgggtcccttatggagatctgtggctggaagacactgtcatggctggaggggacacttctggcccccatccctactggctggcacctccatggcatacactctttccttcccagatgctgcctgcctagaaaaccactctttcaaagcttttttttttccattaacgtcaaagctaggaaatggctatttaagatgttattttctgtcatcccaggaaccaggaaattggggaggtggcatgagcctggtcctgctttatttgttctgaaatacatggaaatgctctcatttcctggcctccctttctcctcactcctatccccgtccctactttccagggcctttggctttgttttgggggccctccccacaccatgtcactgatgtctgccctgtgcagtgtgccctgtggaaggcggcagctatttgacctctcttcccttgcaaccatccagaaacctgctgagctggcggccacagcagccacacttctcacgggctgagcgtcccgaagttctctaaggagccgctcgtgtgtaacaccatagcccatgtgaatccgtgctgacatccgcacagatgaacggatcagatgagatttaatctccctgaggcccatgggcacgagtcactggagttttatggggtccagtaaagagcaaggaaaagtccgggtcttacaaggctgtaatcgcctcttagaaagagtctcccctaaccacctggtgccttagccctgcagggagctgtccagatgctgacccatttaagcgcagcttcctcggccgccttcagaccttccccgccaaggttttttcctccctgttcctgatgtattctgctccatctggggcttttattgggtgtcgtttcctttaccaccctataactttctcagcagtcaaaatggagaagagtcttcattttgctgatgggagccctgcccttggaactgttttataagcaatcatccagttactaaggggaaaaatgatgagagcagaggacgaacagctggtcttaggggagccagaagggcagctgggagaacagccagtgggaatccgagctgctgcttggtgatccggcagggacgcggatggctgtgtgaactctcccaggcttcacactcggatgcatccggaacaggagaccgcacactctcaatgaggaagagatagggttcttaggaagccacatatgagccctgatgaggcccttagtgggctgtggagaggagagggacgctagctgggaggggctgtggggaacagctcagaccgaattgagaggtggtgggaaaaggagggatgtggcgagggctgagtgaggggggaagggagaggtaggaccaatgtccctgcagactccacccccacccccacacacaaagtcaagtccaggagaaaaagagggaaacacaggactgagttcatgagcaagcaggagcaggtgagtgaacaatctcatctggaggcttagcacacccaaaagcacagccccaccttctaggtccccaccaaccagctcggacaggaagtgccatttggtggcccagcctcctgcgtgaagcagaatggacaatcagcctcttgctttctgaagcacagtattccttgggcctccttgccagcgactgtcacctccgccttccctgtttgctcagtcatccaggctacatggctctgacacagctccctgggtcccctgctgagaccaacttttgcatgcttaagccctgacagctggcctaaagattccagctgttgtgcccactcacagcatgggtgatgctgatgtggatggagcctcaatgtgccattctcctttgagcactagaatttggccatatgtagggcaaattacctttttaatcctccatagccttatctggaaataggggctagcaattgtcctagctcagagggctgttgtgaaaattaaatgtcttaacacatggtaagcacttagcagagtgcgtggcatgtaattgatattagctgtagtggggattaatattattattattagccaataaatattattatttataggggcaactccacagtgagctcaattcttcttgctctgaccttgaccaggtttttctgcctacaccccctcccaacttcatggggccctcttccctctcccccagcctcctgacatacacacgtatgcacactctgcacattttcagatactgctcatctcaaacttgacctggatctgctgagaagctctggtctcctccatccccaacacgattgaaggtgccttgatcggtctcgtattgatcagtctggtattgatcgtcccacatcagtgttgatgaccacttagatctggagtttggaattccatctctgctctacactggaagcaacatctgtttgctcaaataaaccagtccgtgtgtactagaagatacatacagctcatgctatgtggctgccagaggtcagtaaggaatctctactcctcgtcatcacgtgggagttcagagtgacagagtgccatcttgacaactgtctccacaatcccaaaggcagagagacgagcatggcaaagcactcagtgattccgaaagcttccacctggaagtgacacatgtcaccacctccacccccaagggaccagaaggaggctgcctggctggaagacatttcctcctcctagacataactgggcctcttccttgtcatccacacaggcacattctgcaaataatgtgcacatggatgtgtgtttctcattaagatctaatgagtgaagccatcagatttgttcagactggcccaggattcagagagagagctgaggttttatgaaactcccctaccaatggggaatccatgaattattaaaaggatagaaaaagagacccagggtggaagggctgctccattattcatcaggcctggagtccccaaatccccaagcacagctgttggcttttacacctacagcattttcccattatgtctacagtcagcctttcaaacacgccgtattggcagcctccgagcagtgctcccgcccacgtcacccactgcctgtctcattatctgaaccagtccgcggcccaaccgtgggacacagatgttggtgttgctcacccaccttcacgtcccaggctccctgatcacagacctgagggcctgagggccaagctccttacaagaactgggagcctctcccactctggccccagttgtctcttcagttttgtctccctccatttcccatgcccaccctacctcagaccatttgcctttccctgaatgtaatttcatattctcaggccttcgtctaggatgacccctttgcctgaaactcccttcccagccctctgtctacctggtgaatttctatttatcatttacggccagatcagaggaagggaaactaacttttgctgagagcccccaatgtgtcagacccttgtgcaaacatgatctcgctttcgcaaaccagtgaggttggcgttatcaccagcatcagagacataattttatggagtccggtgcaacaattaagatgtagccccttgttgaaaactgattaagaatttcgagatggcaaaatcagatcatcaaaccaggcacagagctttcctaagagcaaggctttgagaaccatgaagccagctttggttatcgagaagtgaacgaaagctcagagaggttaagtaacttgtccaaggtcacacagctagttggggcagagccacgttgaagacctcattccatcagatccaaattgctgtttttcaaccacccatgttgtggggacttccccacttgccttgggcagaatgactggggaggaggctttgagcacccctggacactatcttcctttttttttttttttttttttttttgagatggagtcttgctctgtcacccaggctggagtgcagtggcgcaatctcggctcactgcaagctctgcctcccaggttcatgccattctcctgcctcagcctcccgagtagctgggactacaggcgcctgccaccatgcctgactaatttttttgtgtgttttttagtagagatggggtttcaccatgttagccagggtggtcttgatctcccgacctcatgatctgcctgccttggcctccctaagtgctgggatcacaggcatgagccaccgcgcccggccactagcttcccttttgaagggtgttttctgcaaccaattgatctgttatttctccataagcattgcaagatgatccagagaatagggtcacacagatcaaaaagggggcctatctagggggcaagtggacattctgggattgttcaattaacccacaagggaggacattccctcttccacccacccctttcctcacacccaacaccaggcagtctgctcacccccactccatacacttactcttcaatggctggaggacatggcgacggcccgcagaggtgacccacagggcatggatcccaggccagcctctctggcctttgctgggaaaatgacctgcagactttgcaaaaggcacatctcctgggtgctttgcccgttttcatcttttcatttcattgatccagccacctctgaggttttctttggtggttttctccttgacagctttagtcttggggagatgtgtccaacttccagtcattcattcagcaaatacaatgtgcctactatgcgtcagactttctccttttaaggggctcccagcatagttagggagattgacagtaaattcatcattgccatactggtgagagctgtgcaagaggctcctgggcccagagacgaagaagaagaaatccattcttggatttccatcagggtattctgggggatagagaagaacactcttggggtaggtgggaaaagggagaaaaagcggaaaactgcataggcctaaaatgctgtgaatagacacgtggtgtatcctttccaaaaaccttcagttgtcccaactccacctggccccattcacatgtgacaaagtcctcccatgtcaggagacctcagcaacatagatgcttctataaaagtttctgccctacagttttaaactaatatgttcactgctgatgtctcattatttagcaaccaactttgcccccaaatatttccacatgccacatctttgaccccctcttggtctgcagggattttacaggcctttgaggggaagctgctggtctgtgagcatctgcacaagtgtgccggacaaagatatcggtcaggctgccatttcaaagcaataaaagatatgtggctatgcaggccaggaagagttagcccttgggttccccttccaacctggctgaccacactggctccagctgccactttcaaattagtcatagattaacaaacatctattgagcacctattgggtgtccaggacccagagactaaaggagacatagaacctaagaaaggaagaaatgttttattgttagttgccaccatttattggacatatattaccattttactgttaagagggacaaacactttgcttaaggccacacagtacaaaagcagagtggggctttaaaggctcagattctgcacttagacaggcctgagctgcagtcctggctctgccattttccagctgtgtgtcctcagactcctcacttaagcgccctgtgcctcagtcttctcatctgtaaaatgggattcgtgtgagaattaaatgacttaatacatgtgaagctcattgaacgcttacactagtaagtgctcaataaatactagctggcattgttgttctatcaccatcatcatcatcatcatcatcatcatcatccttatttaaaagcagcagcaacggcagaggctgcagccccagctgctggaatttgaaggtgagtctgactccaggcagggtctcccagccctatgcggactctgaaagcctctcctctcccacgccggcccccaactcttcacctgccacccccacaagggtgctcaccccagaggtgctcacctcccgggctgggagaccgcatctgaccggtcccaaaccccgcctgcagctggcagcgccggggtggggaggccccgccctcggccccgccccctgcccgcccctccctctcggggtccggggcgcgagctgcggcggcggcggccacggtcattggcgccgagcggttccggctgactggacggggcgggcgtcccgggcagcctagcgcggtacctcccgccccgcgcgcccagccggcgagggacattggaccagggtcgggggtcgcggccgctccagcgaggtaagagccgggaagaccgggagagaccacctcttccatcctgggggggtccctgggggacggtctcccaccggtgctgggccgcggcgccgggctgcgcccccatgacagcccagccaggggcaggggctggagagccctagcgatcgcgcaccctggaaggggcagtgtggtggggagcgcgggcgtgtgtatgcgcgtgtgcgtgtgtctgtctgtccatctgtctgtcccaaggatgtatcgggggagatgatgacgccccctctttgcagtcgcttctaggcaatttacccatgccaaagctgagggcagacttttccacgacggacttgaatggggctggcagattattatccggataatgcaggaagggataagcccaccaccacctgttgagctgggctgtcggcctatgcgggtccaactccccgcttatcacagcctgcagggtggcctcatttctccagctcgtgggacccggggcttccttctcccgcctgtgagaagggttgataggaggaggtgtccctgccaggagccactgagcagagatggactcgcgggggtgatcagggtggtgctatggggaccccaccgcaggtgctgggcgtgaggtgtcaaccacccaggcacaccccaaatttggatttccccaatcactccaaaacctctcattgtgattccccgatctttgctctcatcctaatttggcagttgatgaagatgcagctcgttaaaaatgttaaagtgaaatcaaattatcacttcctaggactgaaaatgatttgagaaataattccgggagcctggctggggaggaaagaagctcatattctgactagcttctccagggctgccccggggctgcctccggtacctgccaggcacgccggtggttaaggaagcccttgttcccagaaaggaagggattcacccactttgcactggattatcagtgactgggttagagcaggacccaggacaggatccccaagtgggagctgtctcagtttgacagatgtcacatacaagctgtcaccgaggctggcttctgctccacatccatcctggggaacacaagatggggcttcccctcccagccacctcacacccattcccctcatttccacaaacctgaagtcttgatcaattaacagccaggattgcctgggtgtgggtgtgggaccttgattggctctgatgtcctggattcagagtatctcaggaccacaggcatctcagtggcaggttggtggcacctctttgcagaccctgtagccagcccctcatgccgaagtctcctgcctgcctgagaagccctagatctgcctcacttctctgctaacgcagcccctggaggtagctgggggacacctcatctcagggccaggtccccagggtgcctaacagggtgaaatctgtgcttgtgcctgagacctccccacccccaaacctcctctctcttgtcatgtggaaggcagtggatgtgctgaggggctgggtagtccagttcaacggaagatagaggtggccctgctgtggctggggctgttggtgatgtgagaaccccagcatcctggctggctgcaccccaggccccacaagccaacagcacacttgagggagctcagccattctcaggcttgtcagctggggctctgtgacttggtgcagggggagattggctgaattgttcacgcttgtttggaagagactggccttaggttgttgtggaaaacgtcggctccaaaccctgctaggttcctgactgtgtgacactggccaacttacagaatgcttggaggctcagcctcctcacctgtaagatgggtctggcagggggttttgagaatcaagtaaggtcatgaatgaatgacagtgtccattttactggaggtggttctgggctggtgttgtggcctctgctttctctagcccccagcttgactctctgacattggacttgagggaagtggctgtgtagctaggatccctcatgccatccttagaggtgggggaagaggtgtgaattttagtagcagggtagctcacagattgagcttggattcccaaaaagtgaggatggaggatgtaacccagtctccagcaaactctgcctctgcagggagctggcacttctgtccccagcttctgccccgagccattggtgtcctgggcccaccccacacagccttctggctcactgacacttggcacatgcctgctctgtcatcttcttctgagttttgggccagtcctactccctggcagaattgggactagctacttaagacttcaggggcaccaggacaacccctgcccaccaaatatcatcctgttcccccaaacctagccatctgatgcttaatatcccaccattagagacttatgactgtggttcatagtctcatgtcagttactaatccttaacatcaatgacttgttgagaagctttcagggccttggagaggagagaaagagaaggcagaacagagaggagggaaagagaagcttggggagtgtaggagagagaacattgtactttgccagcctcatagttctgcagagacaggcccagctgctaagctcaagaaggccccagggagaaggagaggcttggggcgagggggaaggggcaggcctcaggcagagaaagttgtgaatatcaagtgggaattctcggtgtgaatacagggtgggtgccaggcctgtgtctgggttgggctccggcagcctgttcgagaggtgaaatagtccctgatgcaaaagcatcgtttcttttcatgctgctctacccgctgctcagaacacaccacgtggggtttggtgtgttctatgggtggtgccctctgcattagaagagtctggcctggtcacgctggctgtttaaaattgtcaatgataatttgttaggtcagcaaaatgacagagtataccctgcctggctgtgcctccctgaaaattcccctgtcactcccctcgccctttcttgaaagaagcaaaaatggcataattcactcagacccatgagtttcctgggctgagagtggcctggggggagcagagttcggctgggatcaccctgaaaaggcctgtggaggtgattccttgctcagttgtgcacaaggtcctgagttttccagtgtgggagcaagcagaaggggggacagaggggtgagaattgagagtccctgctcacggcagcccatggccaggctccttgtggggaggagaaggctggcatcacctgggcgcccagggggcttgatgatgtggactggtcctggctggtgaagccccagcaatgagcagtttactgccttttctggatgctccagggggcagagcctggaccaaaagaaagatgttttaagtcaacagtatgacctattggccatgagcacccaagggaccatccttaaggatgattctcgaccacatctattcttaaataataataacgatgacaacaatgatgatagcagctcctcagtcttccataatgagcatttattgagcacctgctatgcatgtgctggctgctgttctaagtaatggggatacgactggagtattattggcatttggggctgccttgttcttctgtttggtgcaggggaggctgtcctgggcagtgtaggatgctctgtaacagtgctggtctctatccatgagatgccagtagcaccccagtccctcacccattctttttttttttttttttttgagacagagtctcactctgtcacccaggctggagtgcagtggtgcaatcctggctcactgcaacctccgcctcccgggttcaagcgaacctcctgcctcagcctcctgagtagctgggatcacaggcatgtgtcaccacgcccagctaatttttatatttttagtagagatggggttttcccatgttggccaagatgttctcaatctcctgaacttgtgatccacccgcctcggcttcccaaagtgctgggattacaggcgtgagccaccatggctggccacccccacccattctgacaaccaaaaatgtctccagagattgccaaaaatcccctgggaggcaaagtagtctgctgttgagaaccactggggatacagctagaaagaaagacaaaaatcaatcctgtttcttaggagcaagcattccacagagcgaaatgaacaatacatatgctgtaggagtagaaaatggaggaggctgcgtggtgaagatgctagaaaggtcaagcagggtcagggtttagagagcacaggtgaggcagggttgccattttcgaaaggagccccaggaagggcctcactgcacaggtgacatttatcagagatgggaaggtggggagagagcgagagggggaggtctgggaaagagcttccaagcagctgcaggaagagaaaatggaggaacatggaggggggtcagtgagtctgggggctgggcagtgtgggagcagctgggtgggctctgctgggccctgcatcaccgagggctgtgagctttctctgtgagtagaaaggggaggtcagtgagcattcactacctgctaggcacaaacgccgctccagggctgttccgcgcacgtgcactgaagtcctgtcgggtaagtgttattccttttcttgattgctcaactgagaaaagcaaggcccagaagggttaaggaattcaggcagcgctgttggggcatgagtatgggcagcccactctctactgtccacactaaaatgtggacttcggagccacacagaactgagttcaaatcccagcacagtctcttactatccgggtggccttagacgagccacagaatctctctggccctcagttttctctggcgaccggtgatctccgctttgcggggcttttgttgggagtgctgtcctcagtgccccctcactggccccctctctgtgcacccgtgccagagagaagccagagggcaggtggccccctcccaatccgcccagccacgggcatgtgctctggacttgtgtatctattcaccgagctgcagcaatgccatctgctgaggtcaaagccaatatcccaggaggtcaggggaagttaagcactccctctcccagagctgaggaggaggtctggccctttcagagtcagcatctcccgggatcttcagggccagtctgctgggttccctctgatgatgctgccccggcttccccaggaagctaagcctgaacccaaagttaaggatcatggttgagcaggggcagccagcacaggctccattagcaggattctgcagcctcagaacccctaagacttaaatccagagagcctcaatgaacccatctggcaggttcacattattgcagaggcacatgtcagaggcaggttcatcactggaaatgtgggttttaaaaataccccagagttgaaaaacgagaagcagctgctggtatccacagacacctccccaataactctcactgtcaaacccctctgctcctcctgtgtggggatgtcttccttggggatggaccgcagtgacagcgagaccccaggaaggaagtttcctgggactgtcgggcacaccggtgtgttgctgtgtgctccagatgtgtgaggtccctctcaggaggtgtgtgtgtttgccctgtttgatccctgagtaagtggctatcggaggtggtgtgtcctccagagcctgtggcttctgatgatgatgggatgtcacagccatatgactttgctgggcaggccctgtgaacctcaaatatctgagacaggtctcagttaatttaggaagttgattttgccaaggatgaggacgtgtgccagtgacagcctcaggaggttctgacgacatgtgcccaaggtggttgggggcacagcttggttttatatgtttcagggagacatgagacaccaatcaatatatgtaagatgtacattggttctgtccagaaaggcaggacaaattggagcatggagggggcttccaggtcacaggtaggtgagagacagatggtcacattcatttgagtttctgattggccgttccaaaagaggcaatcagatatgcatctatctcagtgagcagagggatgacattgaatagaatgggaggcaagtttgccttaagcagttcccagcttgacttttccctttagcttagtgatttggggcccccaagatttattttcctttcccagccccatccaggagaacatcctcaaacgcccactgctggaattggctccttccactcacctgaagataacttccagcaggtggcagccctttctgtacctgtccaaaggagcatcctacccagctgtctcccactgccctaggcaaggagagccgggcaggacagcagagatgcctcctgcccaggaatcttctcagggggctgccacaggaggagccctggcttcaggatgggcaacaggagaccggggtttgaggcccagtgactcagtgcgtgagcttagacaagtccccacactcctctgggcctctgctttccatctgtaaaaggacggggtgggagaggattcatcttctccacaatctatttctggaacgtctgctctgtgtcaagggtcaggtgtgttttatggaattaaactgtccctcccttagagggtttccagtccagaacctctgaaggtcctctagcaccagagctcaagggactgtgattatttgaaaatcaagctggacagaggcaccactgagcagatggagctgtggagccaagcaaggaatcagagtatcttccatcacacaaaaagtaaaggccagaagagggtgccactttcccagtgaggtttaggggggcttcaactcccggctctctccggccccactgcccaccatgccctcacctttactgccaaatgggctgggctggttgtctgcagaggaggcctgtgaaatataaaagtgatcccacggtgggggagtggcttatcagcctctaccaggcaaggcaaggtggtgagaaggtggcatcctggcctgggagggtttatatctggcctgtaccacccactgccccaggaccttaaccaagttccctgctggctcttgctcagtcttctccatgggtaagacagataatgagagcactgtcaggagggtttgtggttgttgcagaaaaaggaaactttacagatgagaagcccaaggctcagagaggttgagccactgcccacagctacccacttaataagtggcagtgctgagatttgaacccaggcctcttggaagtcaagcctgtaggctccttctgttcagtgtagctcaagaaaaaggcggagttgattagaggccttaggtgtgtcctggaactcaaggatgggcctcacagtctgatttcatgagaacccggaatctggagttaaagagaggcaggacccacagctcttgcagcctctctaacaccagggccagcagacctagtttcctctgcaggcctcaggccataagagccccaggcagcctgatggaccttaaaaatagacgagcacttcctaaaaggaagcgtctgatggggctggctacgttgggtgttcacctttggccaagcagctggaaccaggtgatgtgcctacaaggaccactcctagggtagaggggtcagttcttggagaaagagcagggactgtggggagcaaacaggccagtgggcaagtgggacagatggcctatgagttggctgagtaattttctaaagcactgtcttcagtcctgcacgccagcaactggaaagaggctgatgtgttaggacatttccgaaagatggtggccaataataactcccaccactttggaagcatctagcttgtacttgacatgtattgcactatttaatggaatcccctgccataatcttggttgagggtattatgattcccattttacagatgaggaaactgaggttcagtagcttgcctacaatcccatggttgataagcggcaaagccaggatttgaacctaggcccttctgatgctaatgggggcaagctttcactgtgccactctgaagtccagcacctaaagaagtaaaggcaccaaacaaaggaggggaaaagcttggaaggcaaagggggacaggacatttcaagagctacagtttggacggaagttgctcatgcttcagtgacccttgttgcttttggtttttattttctggttattgaagtaatttctgtttctggcagaatgtttgggaaatgagacctatctccgtaatcccagagagtaaatctgaatttgtagaaaatgaccttaccaggaggtagatgtggtgcagtcttgggcaaacttctgctcacatagggttggctgatggggagtttcccatcttcccctgtgtttaaacccaggctacctgaatcacattggagcaaggatgctgcaggggggtggtcctgttccaggagttgggacttccatgagccgttcgtgggtggagacagcctgctcccaactcaaaggcagctggcatagtagtgaaggtcaggtagagggtgctgctcctatctggaaagaagccagctgtcagcctggtcctgggtggggggaggcaggaaccactggaataagccagtgttgcaattgctctcacactgggtgctctcaagcaaaagagtacaagctgctcctggaatttgtctctgtgcagtttggcatgggggacgcagctgggaagaaagaggcccttgactcggggggagagagcctgggctgggggggttgtccatactctctggggtctggagtgatgaaccagacagcagatctgtgctgtcccttccagagccagatgcttgcaagagcatgggtcaccggtgttctctgataggaggtagcaggatgatagagtaatgctaggagctaatactcgttgggtgcttatcactgtcaaagtctttataagcatcctgttgtctaatccttatgaggtacaccttatcatcatgtgtgttttcagatcaggcatccagctctgctgtaagcattagcttgggaattcaaacctgtgctattaatcactagtcctgggcccctgacatatgcactgtgcagtggacaaagggaatgtgggatttggagctcaactgttccatgtggccttaggtgagtcattttacctctttgagcctcagcttcctcaattctaaaatgagaaggagagcagctactatataaggttgacatgatgataaaattataaaggagaagacagatgtcatacaagaggtcctcgatatactgatagccactcactttgtcttcctggtgctgcagacacagagttcatcatatcctctccatattgtctgaatgaggctcagctgaagtttgtggctgggaagagcaaagttaacaggtccttatagaccacagtatcagtggtctcggccccacagccattgtgtgcaagggaatggctatgatgatgacaagttcctactttggatttcccatactgagtgctctactgaatgtctacgaggtcactatcatgaaacacattttataggtgaagaaactgaggcacagacaggttaagtaactcatccaaagtcaccaagctcataggtccaggatttgaacctcaggagccccatgttctttctgaacccttggaatttgtgaaaggcgaatgtaaccaaaatgtctagcatagggtctgactcttccaaaattctcttctcttcatttaaaacaaaaactattcccctaaagacacatgcacatgtatgtttattgcagcactatttacaatagcaaagacttggaaccaacccaaatgcctatcaatgatagactggataaagaaaatgtggcacatatacaccatggaatattatgcagccataaaaagaatgagttcatgtcctttgcggggacatggatgaagctggaaaacatcattctcagcaaactaacacgggaacagaaaaccaaacaccgcatgttctcactcataagcgggagttgaacaatgagaacacatggacgtagggaggggaatatcacacacagggacctgttaggggggtggtgggcaaagggaaggacaatgttgggacaactacctaatgcatatggggcttaaacctagatgatgggttgataggtgtagcaaaccaccatggcacacgtatacctatgtaacaaacctgcacattctgcacatgtgtcccagaacttaaagtaaaatttaaaaaaaaaaaacaaaaaactatcctatatacaggaaccaggtgacggaatggactagctcaaagatcagcttctcctggaagctttgccagatgttccccaattaggggtccttgtctgtgctcccgtggcatccccagcacacctccatcagccaacttgccccctgcactgccaacatcggtgccttcccagctaccccactagaccaggggatcaccaaagggatattactacctgcttgttgaatagcattcatgccatggtcactgaaatcaatgccctgtgtctcctttgccctttggagatctgccttggcccaagaagattatgtcccccagtgctaatcacagacctccatggaggtcagttattaagaccttcaaggcaagtaccatccctggggtcttgtctccatccactctgggaggcagggagccacctgacccacaatgtgcagttgtaagaccttaaggacctgacctcctgcctcttggggctccaagaccaggtgatgtgtgaaagggcgtggccaacagaggcatgttctctaacatgaggggtagctgagagaggctggtgtttactgagccgttacttcatggcccactctgtgccaagcacttcacttccagtctcctttaatatcctcccccagcaacctccctgaccctcataattgcttatatgcatacactttgggtatgcgttttttaaatcgtggtgaatcatattctttgatataaatagatgcagtctttaggggtttttattgtggcacaatacatataacataaaatctaccatgttaaccattttaaagtgtgtgattcagtggcatttgatacattcaaatgttgtgcaactctcagcattctctagtttcagaatattttcatcacccgtgaagcagtcacttccattccctcttttcccaaggccctggcaacctctaatctgctttctgtccctctagatttgccttttatggacacatcacataaatggaattataatcatacaacaagtggcccctgtgtctggcttctttcacttcacataatgttttcaaggttcattcatgttgcagcatgcgtccgtgcttccttccattttatggctggataatattccattttgtggatgtaccacagtgtgtccattcatgaaatggaatattatctcgccataaaatgcatgctaccacacgaatggaaatttgggttatttccgtctttggacttatgaataatgctgtgatgaacattcatgtacaagtatttgtctgaacacctgctttcaattctcttgggtatatccctaggagtggggttactggatcatccggtaactctgtgtgcaacatactgaggcgccaccaaactcctttccacagtggctgcatcactttacgctcccacctgcaaagtatgagggttccaatttctccacatcctcgccaaaacttacaattttcctgaaaacctttcgaagtgtggttacccatgttttacagatacacacgtggaggcactgagcagtgaagcaaacttgtcaaaagctacacacctgcttggtggcagagccagagtttgtgctcagggactgtgcacacttagctaccaacctgttcacttcatggctcttgtgaggctgagaagtcagaggcttgaggcttgaaggagctccattctgttcttggctcctgtctgtgtacctggcaccctctgtctcccagagtgtcccttggacttctgtacctggacacaacttgccctctagaggccccactcatgggcagtaagtgttggtgtgccagaaagcaacagcttctgtattagtcccttttcatactgctgtgaagaaatacctgaggctggataatttataaagaaaaagagatttaatggactcagagttccacatagctggggagccctcacaatcatggtagaaggcgaaggaggagcaaaagcacatcttacatggcagcaggcaagagagtgtgtgcaggggaactgccctttataaaaccatcagatctcgtgagacttactatcacgagaacggcacggggaaaaacccacccccatgactcaactacctccccctggtccctcccatgacacatagggattatgggagctacaattcaagacgagatttgggtggggacacagccaaaccatatcaccttccccctagggtgatatatccagacacccctcacccaccttcccccagtcatggccctaggagacaggagacttcctatgtaaatctcacttggtctcaaaataggtatctcttcccaggtgggtggccctcccttgcacctcttcattgcagaggtgaagatgactgggccaacctcaccttgctctgcagaaggagcataccaggtgctctgaggccagcagatgcacagcaccaaggccagctccctccttccagggcacaaggcatgtctctgatggagcccagacccttggccggggtaggctgtgagtgatggggtcaggtgggcccccactggcttcccaaaaagagtgttgtttcctggagaagggtgggatttgctctgtgcatggaaaatgtctttctcacccttcatgtcgggacaacctcgttgctcccacccaccttcaactccagctccacctgagactgccggtagcaggggtcttgatcttttttctgaatctgaacctgacagcccagccctccgtgactggttgctgcccactctgaatccttcctgagggacgttgctccatttctgggtatccctgtattctcccctcattccaatcccacaggaaacttccagaagttccaaataccaaggaagcattcccaggtgagaagatggagggctccataggtgactgaagtttcagggacagcacaccgttgaatgtcaccccatcaaatgggggctgcagggccaaggccagaacccggcttaatcagcagtggggacagtcccaggtatgggctgggccctgcacacggtcacctcatattccctaccacatccctgaaacaacactgggactatcctcactgaggacaaacctctacagattcagactaaagtgttactggctgatgggaccatttgcaccacttggatttctgctcagttttgaaggcgtttgagtccgagttgggtaggagaattttaccttggcaggggagacgaatttgaggtcctggtagtggccctgctcccctccttggaccttctcccccagcccctaccccagctggtgacccaagttcagaccctgctgagcagaccccagcgctggatgcaaggagaagccaggacgtctgaccttgaccttgggattaacagtgttttacccagtgctttcctatggggctgtgacctccttggctccttcgagtaagcctaggaagatggcattatgggtgacacagacgctgagaggggtgtcctccccaggaaggccagggcaggacctgaactttgtgctttctggagtgcaatcagatgaataggctgccgccgtgtgcattgattgagtgcttgttgtcagccctagagccgggaggccatggctgcccattaagggagtaccgcggggttcacccagcttcaagatcaattcatgtcaaaactgcagccaacattttccccatctgcctctgcggagggaaataaaccaggggaggcagaatacagagacatcattcccggtgatcaatttcctccaccccctcttccctccggatgggaacggccgtctccatcctgatggatgcattgttgtggggagggtgaggaacactcatcctctgaggcacccggggttgggggcaggggtggggggagccgcactgggacgggaggggcagaggaggaggaggccagcaggcccgatggagccagcccaggaaggcagggcaggaacgcagaaggcagcagtgttcccaccccgggagggcagatccagcagtggggtggtggccaggagcccctcactcagggtgcccaaccctgaaccttgggattacacttcctggctgagtggccttgggctgtgttctgggatctgcctggggaatgcaccctacctctgcaggctgaatggctgaacacaggtgggggaccacatcccagaaggcacaaagttcaggtcctgccctagcctccctgggcaggacacccctctcagccttcgtgttctcacaggtgagacggatcacgccacccacaatgtcatcttcctaggcttgatggaaggagccacggaggtcacaaccccataggaaagcattgggtaaaacactgtgaatcccagggtcaaggtcaggcaatggaggcgcacacacctctgtgacgtatcctttctccctcttgcctgatgattctgccgttgcctttccaagctcctgggtgtgtgatctttttgcggtcaagtggtgaaaagatacagtttagatcactgtgaaggtctagaaattaaataattaaggaagaagaattaaaatcccctggtgcttcaggaggtgggtcccggtacaactgccagtcaatccagcctggagccaagttcagcagatcacaaaggggtcaggagaggtgagaaagcccctgcagccaggctgccccttggctctcaaaagcaggctgcaagtgtactccaccccagcctgtcttcctgccctgcattctgcaacccttctgtgtcttcccttgaaagacttctccccatccctgctcttttggcctcagactgaaatggactgggggagggggtctgagaccccattaatggcctgttgagctccctgtgacttgggcatttgcagacagaggtcagttgtccattaaacgatggaactgagcactccacttagcagtgtatatgggacacagttaaataatgaaacaaaaatagaacattgcaaaagcctggggcaggctggcttgtgccccaggaagaagcagagaaagccatcccagggagaggggaggaaattcactgttggcctccctcttccatgaaatgctctggtttaaagtatattttttttttacatataggttatcttttattgatttttaaaattaaagttcacatatatatatacatacacaaatacatacacacacacacacacacacacaatgcagttggaaaaataatttgtgctcattgcagcacactgggaaatgcagaagaatagaaagaggcaggttttcctcctctcctccatccataatgtggggttgggggtgttagagctttccaataccacccctaggaaagggagggggatgaaaaatatgtactgaatttgagagttctagttttggcaacagagtaccaactgtcagcacttcagaaggttttaaaatacatcattgacttataagagagaaggaaatccccagggaactgaaactcaaagccttgagcatgtgaactaatactaaggagaaccagggggtactggatccagatatgtgccatcatagctcaagtctggaattttaatgcctacccatggactgtaaaacgtggtcttgggcccccgcaaggccagaagttcgcactgagactccccctccatgaaggggaggctaaaatttgccaactaccagcccaaaaaattgccaggacatttagatctgcccagattctctaggaaggtggaggagggtctcctccaaaaaaaacaaagaccgaagaatgagctgcccacaggtacagaatctaagtttctaacgccccccagggggagaaatcctgagctaagaatttaatgtaaaatcagatcctggattgatggaacttctagctcacccagctgaatcaaatccaaaaccactttccagagactcttccaggacccagagtacataggattcccatggggatggttgaggggaagccttgctgaagatgagctcacaataaaaattacagaccacatgagagcatggtttaaccttgaggcaacttagtacagacagcaaatggggaaattagcatttcaaaaacatggttgtagaacagtgtggaaaagtctataaaataaatccaatgtgtttaaaacaacaaggaggagtagaaaccatattaaaataacagagcagatttctaatcagcaacaatgaaataaagatgaacaacaaaatctagagcttgttgtttgtaagagctgaataaaattgcccaaactgaggaaataccggaaagggaaaaagagagagaaaacacaaacaatattgggaacgagaaaaagaccaaaatgatatgtgggataatcattatttaacacctaagagaatatcatgaaagagtttatgcaaatatgggtgactttctgggaagtcactcaaaaagaaatagaaaacctaaatagattgtagccattaacacaattgataatggttaatcttaggtcttgatccaagtggattcagggatacttggatagctgataaagcattgtttccaggtgtgccatgagggcgttttggcaggagattggcatgtgagttggatcgagtaggaaagatccactctcagtgtggatgggcaccatctaatcggctggggcctggatagaacaaaaaggcaggggacaggcaaatttgctttctttcccctggaggtgggacaccacctttcttctgcccttggacatcagaacttcaggctttctggtcttcggactctgagacttgcaccagcagcctcccaggttctcaggcctttgacctcagaatgagagtagcgctgtaggtcttccctggttctgaggctttcagagttgggctgagccacagtgctgttatacctgagtccacagcttgcaggcggcctgttgtgggaattcttagtctccataatcatgtgagccaattccggcagcaaatcccctctcatatatgtatatatcacctcccatttctctctctctggagaaccctaatagaaaattgaagcagaattaaaatatacccacaaaaagaaacaggcccacatggttttacttggcaagttttaccaaacctttaagaaactgaaaattgctgttttatgcaaacttatttagaaagtgaatatcacttttaaaaaggtataattagtatataatgaaatgtatcacttctaggtatacactttgataaatgtgtaatcatgataatatagaacatttcaatcacctcgaaaaagtatcttgtgcctctttgcagctaatgccctgccctctgctgatctgctttctcttcctatagttttggctcttctacaagttcatataaaggaaatcatacaatatgtagtcttttctgtctgaactcttgcctgcctgccttcttcccttcgcttcccttttccctccctccctcccttccttcctctctctttctctctctttttctctttctctcttctctctcttctttctctcttctctttctctcttgtctttctctcttctcctcctctccttctctcctccttctctcttctccttctctcttctctttctctcttctcttctcttctcttctcaccatcttgcctaggctggtgtcaaactcctgggctgaagcaatcctctcaccctggcttcccaaagtgctgggattacaggtgtgagcaaccatgcccagctgtgtctggactctcatttggcctaatgctttcaagatatcacccatgtagttgtatacatgagtagtttattcctttgtattgcggagtagtattctatataccacagtttgtttatctattcaccagttttggacactggggttgtttctagtttgggactatatgaatcaagctgtactcgggtgtaagtctttatgcaaccacaagttttcatttttctaggagttccacctaggagtagaatttctggttgtgtggcaagagcatgtttgactttacaaaaagctgcaaaactgctttccaaagcagttgtaccattttgcatttctaccagcaacatatgagagctgcagtttctccaaaccttctccaatatttagtatggccaatctttttaattttagccattctagtatgtgcgtaatggtatctcattgtggttcaactgaaactttgatgatgaaactaaacagattaagagtatatatgtaagacaacaaaagcaagctatgtcccagtaatgcatgggttgtttaacattacaaaatctataaatataattgaaataagcacattatttcaataaatgcagaaaaacatatggtaaaaatcaatataattataaaacaaacaaaaacaaaaacaaaacctctttgcaaacagagaacttccttaccctgataagctgtattttcaacaaatatcatatgtaacggtaaaatgttagaatcattctctttcaaattagacaagaatatcactatcatcacttttatgtcatcgagtccctaagtgcaccaagacaagaaaaaaatgaggtatcagaattagaatgaaaaactacaaaactgtcaatattcacaggctatatgctcatcctcatagaaaatccaaaggaacattatgcagcaaagttactagatgcaagaccaacatatgtaaatcaataatagtacaatacatttaatttaaatttaaatttaagaatgtctgaaaagttagcattaaaaaagtgaaaaggccgggtgcggtggctcacgcctgtaatctcagcactttgggaggccgaggcgggtggatcacaaggtcaggagatcgagaccatcctggctaacatggtgaaaccccgtctctactaaaaatacaaaaattagccgggcatggtggcgggcacctgtagtcccagttacttgggaggctgaggcaggagaatggcgtgaacctgggaggcagagtgcagtgagccgagatcgcgccactgcactccagcctgggtgacagagccagactccaactcaaaaaaaaaaaatagtgaaaagattgggaggctgaggtgggtggatcacttgaggtcaggagttcgagaccagcctggccaacatggtgaaaccccatctctactaaaaacacaaaaaattagccaggcatggtggtgggcgcctgtaatcctagctactcaggaggctgaggcaggagaattgcttgaatctgggaggcagaggttgcagtgagccaagatcgcgccactgcactccagcctgggaaacaagagcaagactctgtctcaaaaaaaagaaagaaaaaagaaaagaaaaactgtagactgtgcagaacgtttcagcacatacatatggcaaaatattaatatccacaacacctcaagaactcctatagatgaataagaaagaagatgaagaatccaatagaaaaaaaaatgggaaaaagacatgaacaggcatttcacagaaaagggaagagaaaaatagccaaacataaaaagataccccatatcaccggcaatcatagaaatgccagttgagatgacaatggaatatcatttgattctcactgtgattgataaaatttaagatatgtgacaataccaaatgttggtgaggatatgaaggcctgagaattcttacatactgcaggtggtagaactacattgaaaaacaattggcgttgcctagcagaataaagcccatttcaccccttaaacaccccccaatacagggatcatgttattgccaccgtttaatatctttactgaatgagactcagaaagctcaagtgtcttgtcagagttcacataagctgcaatgttcccgattcttttcttttttctactctcttaacaggcagcgattctctgagcggctttgcggcaggaatgggaaccctaaatctgcccttaattggccccaggcccggggcctctgtcctggctgtgccttcaggctcttcaggtctctgggccgcaccaccatgttcaaccgacagggggcgacctcttccctggttgggcattgccccttagctccaggaagacagctccaggaaactccttaattttaaaaagaggaatgatcattatgtcattaaattaaaaagttgtgcatatgtatttttttttgagacagagtctcaccctgtcacccaggctggagtgcagtgttgcgatctcggttcactgcaacctctgcctccagagttcaagtgattctcctgcctcaggctcggaccacgcctggctaatttttgcacttttagtagagacggggtttcaccatgttggtcaggctggtcttgaactcctggcctcaggtgatctgcccgccttggcctcccaaagtgctgggattacaggcgtgagccaccgcacccggccatgcatatgtatttaaaaaaatcaaggaaaagaaactgaagtagaaaggatagacacattcatccacaatcctattatcaaagtaactattattaatatttttacactcatcatcccacattttaaaagattcttttttaggaattagcaaacaaactattgatgctttgtatcccaacattttgttgttgttgtcgtttaacattaccttgccacattttccgtcaatgactacataatagtcccttgagtgggtaaaccatagttcctataactcttctttgcagagaggcatgttggtggctttgagcactgtgctattatcaacaacagtgaatcaacatttttgtgtattttgtacttgtgtttatattttttagtagcaattcccagaagtagaatcactggaaccaagagagatgaaaatgcttaacgctcaaccaaattgctttccaaaagagtgaaatacttttatgctcctgccagcagataatggaagttattgtttcagaggtgaaattttttaaataattaaacttttgattttgagatactgtagattcacatgcagttgttggaaatatactgagagactcaatgtagttttttacccagtttcacccaatggcaacatcttgcaaaattatagtacaaagggatatcctggtaaccaagatgctgacattgatatagtcaaggatatagaaaatttccaacataacaaggatccctcgtgttgcccccccgccttttttttttttttgagacagagtctcgctctgtcgcccaggctggagtgcaatggcgctatctcggctcactgcaatctccgccgcccaggttcaagcaattctcctgtctcagcctcccgagcagctgggattacaggtacatgccaccatgcctggctacttttttgtatttttagtagagacagggtttcaccatgttggccaggctggtctcaaactcctgacctcaggtgatgcacctgcctcagcctctcaaagtactgggattacaggtgtgagccaccacacctgacctcgtgttgtccctttatagccacactggcctcttcctctctcccctctctgtccctgaccctaacaaccactaatctgttctccatttctttatttttgtcattgcaagaatgttatataagtggaatcatgaagtgaagttttaaagaaaattatcatcaaaaacaaataaacttatcaatagaagaaatatagaaaacacatttttatttcaatttttaagttttttttttttttttttttttttgataaggtctcactctgtcacccaggctggagtgcagggacactacagcctcctcctccccgtggctcaagggatcctcctacctagcctctcaagtaggtgggactgcaaatgcatgggctatctttagattttttgtagagacaaggtttcactatattacccaggctggtcttgaactcccaacctcaagcgatcctcccaccttggcctcccaaagtgctgggattataggcatgagccaccttgcctggcctgagaacacgtttttaaactggctggtccgtacaccagcactgtccaataggaatgtaatgcaagccacatgatgtaactgaaagttttttatagccactctaaaaaagtataaagacacaggttaaattaattttaataatatattttatttagcccaatatgccatttcagcatgtgatcaatgttttttaaatcactgagatagtttacattctttattcatactacatcttagaaatctggggtatgtgttcatacttaccgcatgtctcactttggacttaccacgtttccagtgcccaagaaccacctgtggctggctagtggccgccatattgggaagctccgctctagtccagattagaccaaaatcagatcatgagtgcatggtctgcatatctttaggcctgtgggggacctcacatgggctagtggctcttagccttggctgcacattagaatcaactgagagttttacaaaacactaatatccggtcccagcccactccatcccacccccagaaggtcacatatagttggtctcagaagcaactcagcattgggattattttaaatccccccagatgacactcatgggcagcgggaattaaggaccattgatatatgggtttggggttgggttctatccaatcctgtctgggcatgggctcctgggagaggtcatgggcacaccatgccttttctcctctcagttccttacctgacttcttggaaagcagacactttcctctctagcagcttctgggaggttctgggctttctggccttgcaacatcctgcacctccccggcccaccccaaatctctgcctccttcatctagaggctggttttagactggggtgcacacaagcttcccaacccatgagtgccatcttctgaggcccagtattttccaccctgggctcagccagcctggtggtcaaccttgcctcctttctggacccgggagtgaagacagccatttgatgacagcccagggcctacatccttatagcagctctgcagagggacagccattcctgtattattgatgaggctctgagtggctgagtgagttccccgatagccccagctcctcaactcgcaggactaacagtcccaggcctgggcctcccccacccgccacgctctccccagcacctctgcatctgcctgatgggatctccagctgagcggcaagcaggaggggtggcatgagccaggctgaggttaacgcttgtcctgccttgcacttctttttccagaccagtgctctccgatgcccagcagcacattgctggctgaggaacagggcaagctgcagccccccctccctccccccaccttctcaccaactgtctcccaggggccccctgaagagtgaaatctccccctgcatcctggcagtggtgtccctccccaggcctcttattctgccatccagtcaggagatagtaaccactctttaaagtgactcttgagagatgaattcaagatactcacaatgttctttaaagagaggtggtcaaggtgtgaataccttgaattcatcactcaagagtcaccagtcatctgccaaggcacagccttgtggtgacagcaaccgcaccctccaagggccaccttccagggccatgagaagcgatggcctttgctgtggctcctatatgaccttgggcttcctcactcgtagggacatgctccaacccaggcagccaggcgctcagctgtgctcagacaccttttcatctgaagtcacgggggcagagatggggaggagaaaacaccaagttgagaactgactcctctgagaaatacatcatccattgtaaagtttttttctctccttctgcatctagttcaagagcctcgccctgaagtagctggtacatcatttctctttttgtactcatgtttgtggggctagaactcagggcttatggctgttgtgtctggacccccagcaacctgtctagttcctctgtttgactcagttttgggggagaagcggagggatagagtgtggtggagggaaggagaggtttgggtatgtgtcctacatatcattagaatcctggtttacagtaaaatgtgctggaggcaggaaaacgatgctgggaggaggtatttatagaagcgcatcacagtgctttgtaacctggcagggccttatttggttgtcttgtgagaatcctccttgggcagcaccgtgtttctcttgaggggcgtgtcttctgcacggcgccgaggctggctccaagtacatcctagagagctttgctaaagccagattggtttccctccccaggcttctccaatccctccttcctcccttcaccccaaaaggaagaatcagcagaaaaatacattttctcttgaaacagaaatactagctctaatcatggagggggctgggcatgatcaagaataactcagtgtccagcaagaaacactcggttactttctcccctctccctcctccttctcctcccccttcccctcttctctccctctccaccctctccttcctcccttcttccttcttctccacctcttccataatcactattttgtaaggaaaatgctgggttcgtccatccacccgcatgatgcaaaggcccaggagaaaaggacttgaatctttagctcacttatcttaggcaagaagctgatactgttgagaaaaatcaggtcagagtttccatttgccattcaggaatctctgtttttcagaagtgagagttttcaaggtggtgagctaagcattctgtccaagcttacctatgcaaccccacgagaaccaggctgagaggtgaatgagagacagtttagtatagcagataactgggctagattgctgggttcaaatcccagctcccccagtttctagctgggtaaagcaaaaagctttaccattctgtgtcccaacctccttatctgtaaagtggggacaataagcttgataaagatgagctatgccacacccagacacatcatagtcaaaatgtcaaaagacaaagataaaatcttgaaagctcggagagaaatgtggttcatcacacacaagggaactcccctgtaagagtaagaactgacttctcatcaaacacactggagtcaagaaggcagtgggtccgtctatttaaagtgctggaagaaaaaaaaaatattgtcagctgagaatcttatagcaacaaaacgatcctccaaaaatgaagatggaatgaaaataccccagataaacagaaactgagagaatgtgttgctggaagagccacttgacagaaaaaaaaaaaatgctaaaagaaggtcttcagactgaaagcaagtgacatcagacattaatttgaattctcataaaaaacagagaggaccagtgaagataattatgtagatcaagcttgtccaactcatggcccatgggctgcatgtggcccaggacagctttgaatgcagcccaacacaaatacgtaaactttcttaaaacattatataagactttcttgacatttttttttttttagctcatcagctatcattaatgttagtgtattttatgtgtggcccaagacaattcttccaatgtggcacagggaagccaaccctgatgtagataattgggtaaaaaagtaatcatatataatacataagcattttatatattgtgcacatgcacgcacacacacacacacacacaccagaagtataattgcatatttcttctcgacagatataaaaagccattgtataaaaatatgtatacaattgaattgttgggcttatcacatacagaattgtaatatatttgacaataacagcacaaaggagttgggagaaggagaagccaagctgtattgaagtaaggaaatgacatcaagtggtaactcacatacacaggaagaaatggagagaaccagaataattaattaaaaggttaatgtaacacatttgttttaaaagaagacctacgtgcacttaccatgtgccaggctagagtctctattttaagcttgttacatgtgttacctcgtaaccctttaaagaagatgccattgttatccctgttttaatcatagtgcctactgcaaagcgttgttgggagatggtgtgaattactatgtgtaaattgctagaacagtgtctggcacgtggtcctggtccaataaatgtcatcctactggaataggggtgcagatatacatgggtgagggaggctgaggaagggtgaaaaggccctggcctggcttccttgcaggcttctgaagcctgggtctgatagatgaccagtgtcactagaattagatcaagtctgaacattgtttctgtctacacatattaacacacagggtaccaaattgttttccatttctcgctggctgttattgcacccggtagccatgggggcagtgagcatttggtgttcagctggagctgccagaggtggtggcccgagcaggctcctaattgccaacagttaagacttaatgtcaccgaattatgaagtttgccacccccgttgccactatgtttaagtggaatctaaggaagaagaaagcatgcaatcctgccttttctaaagggtgttttgctttctgcaaatgctgaaaaataaaaatcaatttctggtgtgggagttgggtggtggctcccttcatcttggggctggtctttgggctggagtgtttctcctgctgctgaggtccctggtatgccctatggccgagttgtgacttggcatggcagagagttgggttgtatctgcagggcatggctgatggtgggtccgggagtgattcgagtcattaattggaggagcagaaagccccaagaagcagaaatatttgctcaagaactcatctctatgttgttggaaaaaggcagaattttttaaatgtatggattaaatggaagagaaagatggtctctatctcttcataggtacaggtgttggggagacgtgaatagggtctgtgcttgggggctacacacgcccagctatgaatccaatccagcttgtgtcacttacaagtgtcacaatccagcttgtgtcacttacaagctgccttagagagctctctgtctctctgtatatgtgtgtgtgtgtgcacataggcacatgtgtgtatgcgaaagtgcacatacataaacacatatatataatatataaaatgcttatgtagtatatatgattacttttttacccaagaatatcacacttcccacattgagcatatggaacttcgtcatatgtaatagttacagaatattccattatatggttgaatcctaatttatttaacgagcatcgcccgcccccctccccagcattggtcattgaagcagcagagatatgcttccacatgcatcttagcatgattttctcaatatagccgtaaagtacattcatagctatggaattactaggtcatagaataattacatgtttaattttggtggattccaccaaatagatatgtacactcactcctaccaagagtatatgagagtgctgcatcttacaaccttgtctgccagcatattctctgtgtgtgtgtgtgtgtgtgtgtgtgtgtgtgtgtgtgtgtgtgtgtctcagtctcagaaggggtttaccagttctacaggtggatattgtatgtttgttttttattcattaatttctgctgtcttattatttcttttctcctattatggggtttatttgcattctttttccactttcttgggctaggtacttagatggtttacttctagcccttcttttttttctaatatatgctcttaaggttatgattttccttctaagctaactttgctttacccaacaagttttgataagttatgtgtctatcattattcagttcaacagacaaagagaacatcttaaatttagtcagagaacaaaaggcacattaacttcaaagtaattctacatatagttcaaacccacaagataatattattattccttttttccgtttcacactcactgtttttttttgttattgttgttgttgctgttgttgttgttgttttcagatggagtctcactttgtcacccaggctggagtgcagtggtaccatcttggctcactgcaacctccgcctcctgggttcaagcaattctcctacctcagcctcccagatagctgggaatacaagcatgcaccaccacgcccagctaatttttgtatttttagtagagtcaaggtttcaccatgttgaccaggctggtctcaaactcctgacctcaggtgatctgcccacctcatcctcccaaagtgctgggattacaggcatgagccaccatctctggcctacactcactatttattgagatttatacacataatcctcttttcattgcttctcttctcttctgcatttctatgcttcaatgctgatcattctgcctgaagaatctgtttagtaatttttttgattcaagtctgctgataacaactttcctcaatttttgtttgtctgaaaatatttctatgttgccttcaatgttgagggatatttttactggacaggacattctaagtggacgattactttctttaagcatattaaaggtgttttcatgttatgttctggcattcatcattcctgtgtctgatgttttcatgcctcttgatatgtccggtaacttttgattgaatgctagacatctgtgtggaacacaatagaagttttggcattgtcatcttccccaaggtaggattcacttttgctgttagaatcctaccttggggaatctgttagatatcctgttagaatcctgttggcaatctgttagataggagaaggttgcctatatccagtcatgaattgagctgatttgaagatgagtttcagtctttgtgaaggcggatctattacttgctcacctagagtaggagccttcccagacccccatttgaaagattgagctatttaccagacctgtcctctttggcaagctctcaactccaatgttgagtccatagcatcataagattgctgtgccatctgcacaaccttttgttctgcctctcagactctcattctgtgtgaactgacacatacctcaactgcagaggttgtacaaaatataagtcttatctcaatgcatttccttcatcttcagttattgacctctaaactattggtttccttgattgctctccaatgtcttcaaatagatttaatccaactgtttcaattattttcagcaagaagcttggtccatgctacataagctagttcattatcaccagaaatggaagtctgaactctctttttatttccattgattgatttattttttcatcagcatcaaactgttttaatttttgtagctgctcaataagcatgaatagctggtagttcccactcatttatgttcatctttaaaagaaatatcctggttattctaaaatgcatcctttagactaaccccagaaccatgtgtcatcttctaaaccaaactcattgcatttaattcacacattaatttaaagaagagttgatatttttacaacattgtattcctattttaaaatgtgatattttatttatcagtcttgttttatgttcatcaatatatatttttaaggtgaggtctcactatgttgcccaggctagtcttgaattactgaactcaagccatcctgctgcctcagcctcccaagtgttgagattacaggcatgagccaccatgccttgatcgttcaacagtagttttaaggttttctttatgtagcaccggcatataacttattaagtttatttccaatagtttaccattttgttactgtatagatattattttttaatgcattacattttccaactggctatttgtgtgtagctgtttattttttaatgttatttttgtgcacagccatttatctcaactcttgtactatttttatgttttttttttttcagctggttttgatctgggcatgcatatgtttacagtgttgcacaagtggtgatgatgcaccccagaaaatttcaaatcgctgatgtaagacattctgctttacataggaggtcttggaattttctggagtatcatcaatagtatagagctctcagtctagcaaatcatgtagctacagcaaacagagctgagcagagcccaggttccaaattctcagtagaaatagggactcttctgttatggagttgtttcaaattctctctgtctatgtagcaggacatttgttgtacctcaggcatcaggggtaaaaaaatgcctttaaaatctttcaaatcaagtctgacaaaatttcttttttttttttttgagacagagtctcgctctgtcacccaggctgcagtgtagtggcgcgatctcagctcactgcaagttccacctcctgggttcatgccattctcctgcatcagcctcccgagtagctgggactacaggcgcccaccaccatgcacggctaattttttttttttttttttgtatttttagtagagacggggtttcactgtgttagccaggatggtctcgatctcctgacctcgtgatccacccacctcagcctcccaaagtgctgggattacaggcatgagccaccgcacccggccaagtctgacaaaatttctaagaatgctaaaacaattcgtattgtttaatccagaaattccacttaattacacttgcagaatttatcctgagaaaattcttgcagatgcccacacatatttagctgtaagtatggttatttactgtagattacaataaaggaaattttggaaaaaacctggatgttctagagtagagaaatggctacatcaattttggtatatgcaaatcagagactatatatattctgcagctactaaaaacagtgcagaaaatatttatgctattaagtaaaataaaactaggccccactatggatggtatgtgcagtatggtccctttttaaaattttttttggcaggatcttgctctgtcgcccaggctggaatgcagtggtgtgatcatagcataacctcgaactcctgggctcaggtgatcttctcgcttcagtctcccaaagcactgggattagagcactccaccacaccttaccttccattttattttatttttaaattttattttattttaagttccagtatacatgtgcaaggtttgtaggtttgttaacctaggtaaatgtgtgtcatggtggtttgccacacctatcaacccataacctaggtattaagccctgcatgctttagctatttgtcctgatgttctccctccctctgcccactgcctcctgcactgacaggccctggtgtgtgtttttcccctccctgtgtccatgtgttctcattgttcagctcccacttatgagtgaagacgtgcagtatttggttttctgttcctgtgttagtttgctgaggatgatggcttccagcttcatccatgtccctgcaaaggacatgatctcattcctttttaaggttgcatagtattccatggtgtatatgtactacattttctttatccagtctatcattgatgggcatttgagttgattccatgtctttgctcttgtgaatagtgctgcaataaacatatgtgtgcatgtatctttataatagaatgatttatattcctttgggtatatacccagtaatggcattcttgggtcaaatggtatttctggttctagatccttgaggaatatccatactgtcttccaaaatggttgaactaatttacattcccaccaacagtgtaaaagcactcctatttctacatagccttgccagcatctattgtttcttgactttttaataatcaccattctgactgacatgagatggtatctcattgtggttttgatttgtatttctctagtgatcagtgatgttgagttttttttcatatgtttgttggccacataaatgtcttcttttgagaagcatctgttcatgtcctttgcctacctttttatggggttgtttgtttttttcttgtaaatttgtttaagttccttgtaaattctgggtattagacctttgttagatgagtagattgtaaaaactttctcccattctgttggctgtctgttcactttgatgatagtttcttttgctgtgcagaacctctttagtttgattagatcccatttgtcaatttttgcttttgttgcaattgcttttggtgatttcatcataaaatctttgcccatgcctgtgtcctgaatggtattggctatattttcttctagggtttttatggtttggggttttacatttaaatctttaatccatcttgagttaatttttgtataaggtgtaaggaaggggtccagtttcagttttctgcatatggctagccagttttccaagcactgtttattaaatagggaatcctttccccattgcttgtttttgtcaggtttgttgaagatcaaatcattgtagatgtgtgatcttatttctgagatatctattctgttacattgatctatgtgtctgtttgcataccagtgccacgctgttttgattactatagtcttgtagtatagtttgaagtcatgtagcatgatgccttcagctttgttctttttgcttaggattgaccttccattttaaatgcatagaaaatttctgcaaagaaaacaatgatataattgctattatcactacttggttagtactacctggttagacagcgctcctacttggtgtttatgcccatgcctttggggaaatattgtgatatttatgagacatcttgttggactttcaataaaggcaccgtcagctctctctccagctggacttcttcttttgttaagagcagtgacccttgctgggtgcctgtcatgccccttggtccctacggaaaatggaccttcagttaccttctgccaaaccaaggatgagaaagttgtattagacactgacctccactccaggaagttttggaatgcagtgtggcaggggtgtgccagagctctgtatcctcatctctgtagcctggactcctggcagacaggctagctgtggctttgcttttagtcttggggcagagagagcctcacactccaaaagcataatcctggggttttgtttttgtcaaaggacaggaatccctgcctggcaatgctcactctccaaagggcctcaacaatgtggcagagagagtttggtggggtcagcagggaaaacaggccactcatcaggacctccatccctcattagctggcagcttcatgaccacttgttgggggccagtgtctctaactaaaaggatcccaggttggaagagcaggactgtaatgacacctagaggtctccagtctccaggtgacacatccccttctgatgctgagtccctgctgtgcttgacgtgtccttagtacgcacttgacccatgtttgctaacatcatatttattctttgtctactgagacgccactgtgcccaccatgaagacaccttttatatcattaaacagagcattttatctcctcacatcagaaaaaactcaaatctctccaatttgttgatatggagatgagagaggagacaggagggctgaaatttgccagggatggaaaataaaattctgcagggagcaaatgccatggaagttggagagctggacaaagaagagaaagtctgagccattttgcccttttcaggggcaaatttaccttattaaatctgccttgttgtttatcgctctttgggtatcaggttgtgcttctttttttctttctttcttttttctttttgagatggagtctcgctctgtcatccaggttggagtacaatggtgcaatcttggctcactgcaacctccgcctcccaggttctagtgattcttgtgcctcagcctcccgagtagctgggattacaggtgtgtgccatcacgccaggctaatttttgtatttttaatagaaacaggatttcaccaagttggccaggctggtctcaaactcctgacctcaagtgatttccttgactcggcctctcaaagttctgggattacaggtgtgagccaactcgcctggccaagttgtgctactttctgattgcagcattgtactgagatggcatgaggtagcccagacttacttgataagtctttcataagtcttcacaataactcttatgaagttatccctgttttacagatgaagagactgaggttcagagtggccatgtgactggcccaggatggtacatgggagagccagcattacatcccagatttgcctacttccgtgtgccattcactcccccatgtagctgtaaactccagggactaaactatgaccctcaagccctctgtcactgtcacgttctggacaaggccatgcctggaatttatatcacatctaggtagtgagaaggagctaagtaagtgaataaagaagttattttggtaacttctgttgtgtatcaaattatcttgaaacgtaatggtataaggctgggggcggtggctcatgcctgtaatcccagcagtttgggaggccgaggtgggtggatcacgaggtcaagagattgagaccatcctggccaacatggtgaaaccccgtctctactaaaaatacaaaaacttagcggggcgtggtggcaggctcctgtaatcccggctacttgggaggctgaggcaggagaatcgcttgaacccgggaggcggaggttgcagtgagctgagattgcgccactgcactccagcctgggcaaaaagagtgaaactccgtctcaaaaaaaaaaagaaaaagtgtaaaagaaagataatggtataaaacaacaactgttttattgtgctcatgattttgcgggtgtggaatttgggaagtgctcaactaggcagtttttacatggagtttctcatgcaggtgcagtcagatgttggctggggctgctgttatccgaaggctcgactgggctggacatccatccaaggtggcccaatcccatggctggcagctagtgctggccactggctggaagtttaattgggctgtcaagcagagcacctgcacatactctctaaacaagtggttctcaaccagaggtggttttcccctcaaagggacaattttgtctgtcacaactagagtgctaccaacatctggtggatagaggctaaggatgctataaaacaaccttcaatgcacgtgatagcccccagcaacaaagaaatattcagccacaaatgtccatagggccgaggtggagaaaccctgttctaaagcatggtggtcccagggtgtcaggtttcttacatgaggctggcttcccctgagtgaacgccagagaaaaccaggtggaacctacatctcctcttgtgacccagcctcagaagtcacatagcgccaggtgtggtggctcacacctataatcccaacactttgagaggccgaggcaggtgaatcacttgaggtcaggagttcaagaccagcctggctgacctggtgaaaccccatctctatttaaaaatacaaaaattagctgggtgtggtgttgggcacctgcaatcccagctacttgggaggctgaggcaggagaattgcttgaacctgggaggcagagtttgcagtgagcggagatcatgccattgcacctccagcctggatgacagggtgaaactccatctcaaaaaaaaaaaagtcacatagcatcacttctgtgtactttatttgtcaaagcagtcacaacgctgcctagactcaaggacaggagacagggcccccgcctctcagtgagaggagtgtcaaagattttgcggtcattttttcacaaccaaggaagataatggggattagcatggtgggaagcaggcagggccagagaagcactgggggttttcctctggtcaccagcccatcctgctggacactggctacgctgacactgagtcactggacaagctcccaggagcagctcttgtcactggctccaaagctttgtcaaaaacccctacaccatgaaccttttatcaaagcactctgagttttctctgagccagtaggaaactgagatcagggtgtctgcatttgactctctttccacttccttcctccttctctccaattaaaccccatccatccttcccagcaattgataactgggctctcacttgctcctctaacctcacctacctctgggcacctaagcacttcattgcaagtccttttattattggcttgagcaggggaatgtgccattaatgatttaatctccacaagacatttctccctaattgctagtcatggatgataattagcgactgttaattcctgataattaacaagctaatacttagaggtaatggcgcctgggtaatcatcttaaaaagctcctgtttctactaaaaatacaaaaaaattagccgggcgtggtggcaggcacctgtagtcccagctactcaggaggctgaggcaggagaatggcgtgcacctgggaggcggagcttgcagtgagccaagatcgcaccacggcattccagcctgggtgacagagcgagactccatctcaaaaagaaacaaacaaacaaacaaaaaactcaagaaggctgcctgcttctggaacccagccctcaaaagatgacactacatgttgccatctccagcccaggagtttagctggagccctgcacttttgtatacaaggagagtgattggagaatagatcactctaatctttaatttagttttcttctctgattctggaaacaatacatgttctttgagaagctttgttgagcacagagaagtattttaaaaaccatgcataacctaattacctggaagcagccatcatcaacattttgggttatttctttccagtctgtgaattttgtatacggttgagtttaagttaaaagtgtgatgttgcattcaacttcattaatttactattatagtgtaaacattttatcttgtgatagcaacttataaaaaatggctcctctcctataagaaaaatcaaatgaacatgagattcatgggatagagaaggaaccatgtaaaagcagaagctcgaacaagggtctaggaatacagttcagactagggtgtcttcaagggccttcctgtccctactgaagacactgggtgagagaatatgtacacacatgcacaactacgtagaaaaaaagactaaaaggcaatgaactaagatattaatgatgatggtgttctaagagtgggaaagtgcaggtaattttcattttctgtgttatataattttctgcgcaatacagaaggaaaaagcactgggtcaggatctaaactattgctggtgcacacttttatcttttcaagtaactgtttgggttatcccaggcacttctcccctctggatcttgatttcctgtgtgtgctttgaggaaagtattagtcctgccaccccactaggtgggtttcagaagtagaaatcctgggtcagagtgcacctccaagaagctaccagaagatatgactggatgactcccaacaatatgccctatagtatcaaacgagaagcctttatgtgacacttggccacttctaaagaaacatttctgaatactgtgtctcgtacatttctagatagcctgagtgacctactttggattattttccttcttcccaacactctttgagcccatatttcttcagtagcgagatgatgtagtccaagcatagactttggagttagacctgggtttaaagccagcctacggctcacctgtgctttcctgtaggctactccacatctctaaccctgagtttctccatccacaaagtggggctgatcccacctactcacagggttatcgtgaggtcctgatgaaaccctgtacctgaaggattttgcacagtgcctgggagctaaacctactcagtcaataatatgatttatttataaataaataggattacataatagaagcatagatataattttgtaatgaataagattgctattttccaccccaggtagcattccataaatgtattacatactctggaaatagatgaaactttttggttttcctaggtatattccaggctttaggatctgctattgtagagtttggcaggcaaggtcactttcagcctcttttatttctcgcttttgtagattaagatccaatctcctctccactttcatctttccaaatctccaaacatgaatctttttcatctccctgccaagcttaacattaagattggctgctcagcttcgaccaggcaacagcagtcgtgcttcagaagctctgatccattctctctgcaagactcaggggcttagtccactgttgcttaataacaataccttataccaggatcatgctttagacttttttcaaagcatagtcatatctgctgtcgtgtttaatcacaccagcaattttgtggagtgagcaaggcaggtcttcctattcttcctggcaggcagtgtggttcccaaagtgggtttcacagaacatgatgtcttttttttttctttgctcaaataagtttggaaaatacagaaataagcaaagctaagcaggcttttcaaagcctttaccataatgtgcaatgcggttcttcaagagctaggtgcagtgcttctcacaagctgttttttttttttttttccttttaaccagagtcactttttctagaatattccatggaattattgctccatggaccccactttggataaactcatggggtgggagtttgagaacgcaagccttgaaaaagggcttgggagtggggcaaggtaaggttcaaatgcaggcaccaacatttgccagctgagtgctcttgtgcaagcttcttaacctcactgatcatcagtttgctcacctgtaaaatgggtgtggtaatagaatagccaggattaaaatggggagtaaggtgcttaacaggatgcctaacaatgataaacgttcaatgtactttggtgtttattattagtctcttcctccatgttatccaggagaaaatcagtcttcagagagtgtcttagtttgttctgtgttgctataacagaatacctgagactggataatttataaagaaaagaggtttatttagctcttggttctgcaggctgagacgttcaaggccatatccctggcctgtgatgagggctttcatagggcatcacgacagagcagagaagggcaagaaggaaacggagaaaacctgaggctttataacaactgtctcaagggaactaattcattccttcaaactaatccagtcttcgagggtgagaactcaccaccatgaaaacagcaccaagccattcctgagggattccatgaccccagacaccttctgctaggcacacctcccaacactaccacattgaggatcaaatttcaacatgagctttggtgggggcaaacaaaccaccttatccgaaccatagcagagaggttaatttcccaagcttacatggatctttagtggcacggttgagtgtaagttcaaggctctgttcgcctttgggagccatatccctttgttctccactgctccccttactcctgctaaccatccttggtgtttcaattccatttcctttggcagatgttgggactttgtgagcttcaagtgtaaatgacagggtttggctaactactattaatataaaaatactatcagtacaacgtcactagcacttcccaccagtcggcagcagccttgccctggacctctgctaggagttggcttctcttccccaggacctgggttctgcctgttatgatgctaccccaccttcagtcagaatgggatgctgtggtttcccatttttccagctcgcaaactctgcaagcggcagcacctctgattttgttgcctcttcctcagctgcaagcacagggcttataggcgctttactagatactcatgctagatacaaactgtcctgctcccctctgcccacgctgttgcatggagaatgatttggctgggtggagagggctgtttggtgtttcatttctccctcctttgtcaaagccaacacaggaaggatcattgtggcttaaagccctgtgctcttcagccttgcaaacatggacatagactcacacatgcctccaggaagccaatatatggctcactctgtagatcaatcaactttcccatgatcaactgctagagcagggccggcgctgtggaatcagggccagcgtgcacccctcaaccccttctcacaaagaggctctaaactctgccactctcctcctacagtcaactcagactctgcagacaaatctggcttctgtccattttcagctgcctcaatacccacctgtgcctcaaatctcaactggaacatgataccatccctggggcagggccctaggactccactggagccctgatattggtggactgcaccgaagcactgctgcacctctttcccaaacatcactaacatccagtttcaaaagttctgactttgcaatattgcaaggtgccagtgaaagatgccgacaggatagcaaacttgcagccaagggtggcttgggtgacacaacctttctgagttgccccaggcctcattctcttctagagatggctctgcctgccccctccagccccactggatgaccccttctgggcccttgtcatatcctgggctttccccatcatagcagttgctacattacaatgccatcaactgtttgcttggcacagcacttctcagattttagtaggcagacaactcaccgggatcctgttaaaatgcagatttcaatttaggatgttggagaggccagagagtctacttttctaaccagctgcatggtgatgcctacatggctggtccatggaccatactttgagtagcgaagatcagttgttttgaactttggctacacattagaatcacctggcagaatttaaaaaataccattgtccaggccccacttgagctcaattgtatcagaatctcttggagcagcaccagggtatcagggatttttagacacttcctaggtgattctagattacagccagagcacagaagccctgagactggctatgggctccacgggggctggcatccatctgccttgctctccactgttttccagctccaagtccagtgcctgaccctggcagatatcagcaggtggggcttgtggttgaccttgcttagacacttagcttctctttttctcgttcattgctggcccctgccgatacagcgtgctgagcaggtaagagtcagcccatttctgattaggtggatttaggaggctgttgcacttggactgtggtatggcttctttacttgtgttgaccaagtgctgcaacttattagagtcacatgaggaggacactttcctccaagaaatcttccctgcctctctactccttcccaaggctgctgccattttcctgtctggagctggcatctctcacagagactatttgagcctcagaatccttttcaacacagagaagctcacccagcagagttgtctcctccattcttcctctctacttcctggacaggtctctaccacagccctcaataggtcgcatttaattgctttgggggtgcctttgttcttctagatgggaaacccttcaatggcaaggatagtgtcatgttcatttttgtatctcccatgtctggcacaatgggttgctgaatgaatgaatgaatgaatgaatgaatgaatgaatggcagtacccagcaaggggactcccagagaggacaagggggtccttgcagtggcatgccaagaacgctctgaattgctgcggggttagggggagggtggcacctctgttgcagtgacctggtgtccagggggttgcctggtggtctttacccatccattgagccaggttggggtttgactttagttactggctcctcatcttcgtcttctcagagccgtgggtactgccacctgctcacccactctccctagccccagagcgcagtccgtgctggtgggagcgtggcgactagttgcacagcaacggtccaggaagatgagtgcctgcgggaggaaggccctgaccctgctgagcagtgtctttgctgtctgtggcttgggcctcctgggtatcgcggtcagcaccgactactggctgtacctggaggagggtgtgattgtgccccagaaccagagcaccgagatcaagatgtccctgcactcaggcctctggcgggtctgcttccttgcaggtaagggtgcccagggttggggacagccctgccccctgacatcacctgccccaagaggtccctccctgggaagagatggccaagagatgctggaaggagaccattcaccacggatgatccctatatatggcgggtggtgctccctgcagtgactgggaccccattccaaactcaagtcctgattctcgatgtccatttgagccagtcttttcacctcccaggtcttccttcctgaaagatgaatgtaactatgccttccccacactctgctcccaggactggatgccaatgacactgcacagatctcaaatgttcatgcatgctttagctcattgaagtattgatcccatataattctcccaacagtactgcaagacaggacttgttatttccactttgcaaatgcagaaatgaagattcaaagaggttaagtctccttaactcagcttccttgcatccactagtttatagattagaaaatacttggcagtttctctgttcctcactccataaaatggcacagaggaaacacatgagcaggtccctccagctctgcagcatggtagaggttttgaccccacttatctgggcctacctttttactcactagggcttccctgtaacccttcaagttaccactccaagaattctatcctttatccctttatcatgacccaagaccagcctgcacaagaaaagcatttccaagtcatacaagaatagctgcaagctgggctggcctggattgccacagtgtggtcactgggcttttcttggtaggggcttgtaacttatgtgtgcactgggaagagacacagtttggctctcccagccttttacctcccagcttgatagtacagctttgggggatggagtgggtatttgttcctaccagtatttagcagagaagacacctcaaggtgttgagtctgccatgtgaatgacatccaactctggcttcttctgcctcagactgcgtggcattggtctgtgcttaaatctggagtttgaagtcactaggatctgatttccagggtggttgacagggcttttggagttttgctccatgacacccacactggagaatctaagtcagctatgcaccattgtcagccccatctggccaaacgcagtgagatggcaccagatgttcactcagcatggagagtttgcaataccaacctcttttcatgtgactcttggtgcttgggtccatcctcacacaggcgcttctccaggaaggttgtcatgtcaggacgtgcctccacccctgctgtgggctatgagccagggacaggacccccatagggtttggatccagctcaggtgcaaagacacagcaggtcaaagatcctaaaaacacacttggaaataccatttgtatggaccaacttcaaatccatgttcaagagggacctggaaatgtgattcttgtctccacaggtgaggagcgggggcgttgcttcaccatagaatatgtgatgcccatgaacacccagctgacatccgagtccacggtcaatgttctaagtaagtgccttgagtctggcaacctgggccactggctggacagagaggagcaaggcagagggaagagtcagtgtgccagcatatttctcaagaggaatgcccttagactcagctgggtgtgctgtcctgttaattagagatgatccactagagcttaattttccagtagtgaaaacaggttgctggagtctcccagtctactgacccaggcatcaatcagggaactgagctctctggaccccagggagcctgacttcatggccttgacctcaacagagtcgtttctgcccccagtatgaatttgcaatattgcaatgcaattctgatgctaatcacctggagttaacagagactccacaggtttaaggtctcagtccccaaagaaactacccttatttcagatgccagctgcaagttcagaggtccctggcctcctgcacttctgaccaattagctccaaatatgggagctcccataactccatcaggttcaataattgcaaaaatgactcacagaactcgggcaagtgctatacttaccattccaattttattacaaaggacacaaatcaggaccagctagatgaagagacacatagggcaaggtctgggggtgggtcctgaatgtggagcttcagactcttctctccatggaatcaggttgtgtcaccatcttcacacactgatgtgttcatcaaccaggaagctcaactgagctttggtgtccagagtttttattggggttcattacataggcatgattgattacattattgatcatgtgattgaactcaccctctagccccttaccttgcctagaggccaggctgatatcacctggctcaaaaccccaatcttctaatcccatggttggtgtttctagcccccatcctgagtcacctggttagcaaaaactcaggtgtggttgagagacccaccatgaataacaaagacactcccaaccttggaaaattccaagaatttagaggtgatctctcaggaaccagggacaaagactagccccaacagaattgctccccaagtaattataagttgaagaaaacagaggctgtaactgtcccctgcaccattcagagcaaccccttgcccaaggaaatggtgaatctgcctggaagaggaagcaagatggaatgacctggcccttccacagctgccatatttgcaggtggtatggactccatattggcagacagtgtggactcccaggagggtagtagcttatgcctggaggaaatgacagaggccctgaagatgctggcacttgaagtcagaccttccgggcccacctcagggacaaaagccctgctagtaatgggagatccccaggccacctgatgggggtagagtctggggaacccctgcaggggtggggctttgaggaccagttggtagacactgccaggaacactcaactcaggatgatgaggaatgaatcaggcctggaggctgacaggccgcccttttgtcccgttaattagagatgatccgctcagccacaccattccctctggtcagcctcttcttcatgttcattgggtttatcctgaacaacatcggacacatccgtccccaccggacgatactggcctttgtctctggcatcttctttatcctctcaggtaagttgtgttgttttcttttcttgcaccctggaattttttgttttttgttttttgtttttgagacagagtcttgctctggcacccacgctggagtgcagtggcacgatcttggctcactgcaacctccacctcccggattcaagcaattctgcctcagcctcccaagtagctgagattacaggtgcctgccaccacacctggctaatttttgtatttttagtaaagatggggtttttccatgttggccaggttgatcttgatctcctgagctcaagcaatccaactgccctggcctcccaaagttctgggattacaggcatgagccactgtgcccagccaccctggacttttgctgtttaactcccaaaaggctctgcattggaaagtcctggaattaggataggctgagtcagttattcagacagaattgagtcagagatggaggaaacatctgaggaccctgggcccattattaccttccagaagagcaacagaggctccacaggaggggtgactgcacagactcccctctgacaaatctgggattggaacccagggttccttcctcactccacacatcactgcacctaatgactttttaattcccaccatcttgagtattcctatttttgaaggggctatgtcttcatatttgtgcatgaatattaaacacaatctgcctttggaataatgggtcctttaccccccatcccccagctgtcctcaggagactcctgctgtctccttccctctccagtcacaccccacaccataaaccctcctagaccccttcaacatggacttgtcttcctggactgatgccaggttgtacttcattctttcttctttttattcattgatgatatcttccaggccttattctggctgctggcatcactgcctacaaaaagggcagtgcaatgggagatagaaacagtagacagaagataggaacccagtgtgaataggactatgaatggtggccagcaaggactgcaagggggccaagaccagtgactgaaactcagggcaaatgttggtcatggaagactaccaggaggaggcaaactaaaggatgagtaagaattaggcaaagaagtgaggttgggggtgggggtggaaaatgggcctggaggaaagtgggaggatgaagcactgggggaactgagtgtaatcattgctcatcatggcaggtgcaaggaaaaatgtagtgagaagagagactggggaaggcatctgaggtcgtcttatggattcgggactttaggagaagacttagatggattttgagccaagggatgacacgattgggtttggattttcgaatgaccatgctggggaatggagggagggagggaagtaagacaggaggcagggagactaggcaagaggctattccagtagtagaggcgatggcccaaacagggggttgatggtggaaaagagagaaatgagagggttcaagtgacatttgagaggtaaactcaacagaactaggatgaggcttccagggaagagtcaaggtaagtgccaatttcttgcttgagcactgggtggatggcatatcacatcattgattcagggatcacaggaggagcagatttgggcagctcatgagtttagtgtgggaaatgctgagtttgaggtgtccttatgacatctgggaggaggtgtccagaaggctgccagaggtcagtgtctggggctcatgggagtgacttggaccaaagatagagattggagagctatcagcctagggagtgggagaggaatccatggacatggatgagattactcatggctggtgtgtagagtgagaaggggaaagaaaacagcaaataaaggtgggctctttctccttttcaaggtgacctgtgcattttcatggagaccttttcttttggagataacgacttgggccaaaggagtggctctcggggcatgtaatttaggtgccccggatgactgactggttagggatcctggggagaagatgcttggatggaaaatggatgggtgaatggcttgaataattgatagatggatggatggattggtgagtggatgggcggatgggaagaaaggaaaaacagctattggataccaagcattctgattaccacctgactcctgagtaattttaggatccttttcccaatattttcttgtcaacgtagcttgggagccaggtggcagtcagaaagtctgatgtccaagagccactctttctttctccttccatccatccatccatccatccatccatccatccatcaatccatccatccacacacctacccactcttctttccatccatctgtccatccatttttcaatctaccaccaacccatcatccatccattcttccatctatcaacccatccttccacccttccatgcatcaacccaacacatatttattgagcaccaggaatgttatcagcccagcttttgcatggtgatatttccacgaagtctatgaggtacagactcagggttagttaagctttttatttttccttctgtgaacttcacgatagccaaagctataaacagtagctttgacatacgtgaggtttttcagcagtgggctaccagatcagaaatctaggattgagatgggccacatgaagtcatttcaatgataacaataaagagggttcatttagtgcaccaatgattcaaacataagtactaggaaggtttcggtcacaccagttttcctttggcattcatccttccagatgccctactttcataaaataatgtgagtggaattaaacctgaacaactcaaaagagagtaattaattatgtcttgattcaattacagctactaattgatagaactgatgcctgaggcagtcatttgcacaatggcagtaggaggttggtccccccggcctcctgatttaaagtttgccaaaatctggacaaaatccctttacctcccctacctaaagatctcagacaggccacaccttgtggtcaggtgtgttggacagaccatgggccacatgagggaacttcacaatgataggtgccacctaccaccttggctatctctgcccatggggcgtattttacccttcagttctgtaaaagccactttctagctcagtggttcacagccctcttaagaaaatgcagtgccaggcgcagtggctcacacctgtaatcccagcactttgggaggccgaggctggcgatcacttgaggttaggagttcgagaccaaccttgccaacatggagaaaccttgtctctactaaacacacaaaattagccgggcatggtggcaggcacctgtaatcccagctactcaggaggctgaggcaggagaatcacttgaacccgggaggcagaggttgcagtgagccgagatcgcgccattgccctccagcctaggcgacaagagtgaaaatccacctcaaaaaaagaaaaaaaaaaaaaaaagaagaaaatacagtgccaggtccccatcccaggccaggtgtatcagaatgtccagagctggggctcaggcctgtgtgacagatatgcacagcagggtgagaaccaccgggcttagcccatggcttaggagggcagctatataggagcttcttccctcaaactatctgctgtctagaaggtgctggtctgaacagggtgcttgggaggaaagtttctgctctcctttgaactccactgagagcattgttaccccaaggctggtggctttgctcctgaattgcaaagggaggtgggtgccacctcagcaaacttcctgggcctctgggctgagcatcccctctcccctgctgcccaaccaggcctctctctcgtggtgggcctggtgctctacatctccagcatcaacgatgagatgctcaacaggaccaaggatgcagagacctacttcaactacaagtatgggtggtcgtttgccttcgccgccatctccttccttttaacggaggtaaagcccgtcaccctaagtatggataggctgggcctgggcactgccccactgagccggggagagtggggatgggggagaagggacattccacaaccattttggaccccggaccacccactctacttcccttcctcatcccagaatgtgtcactgtcttacctttctgggtctcctccggccaggatgtccccaggaccctgctcctgtccccacgtccacttcccaccccactcgagctgtgtcctgtgcagaccccagccaagggagatgaggcaggccccagcagcgagcccatcctctgctgtcttctccctgtagagtgccggggtgatgtctgtgtacctgtttatgaagcggtacaccgcggaggacatgtacaggccccaccctggcttctaccgccctcggctgagcaactgctccgattactcaggccagttcctacacccagacgcctgggtcaggggccgcagcccctccgacatctccagcgaggcctccctgcagatgaacagcaactaccccgccttgctcaagtgccccgactatgatcagatgtcctcttcaccctgctgagcctcggccgcccccatccctggactgtgggtggccagacaacccttcctgttctctccaggtgacccctgagccccaggcctgtggttgacaggcccaggccacccatgcttagctgttgtcacttgaccccagtcctctccctgcttctccagaagggctctaactgccccagcatgggtgtgggagtctggagtctgtgggcaagctgattgtctgggaacatgggagaagccccgcccatgtgagtgccaatcacagcagtggctccaggaagccagcagctccccccaagcccaggagacaccgatgttccctttgtatattcttcctgcaccccccaacttcatggccctgggccagggccagctctgagatgccaagctccttacacagatgcagctggactcgtgcacttgccaactggcctggccattcacattcaagatctgcaccatctggccgaaaggtgactctgatatagaggtctggctgacttagacatgtcaagctgtcagtgttccttctgaactcctttctccttgtcacccctgtccctccacatgacacacctgtccatgctcttccctccctgacacaggctgtggtgaactttttctcctttcctcacaccagaactcagctgccctgggccctggcactaagggactaagggtggctctgaggccacactgatgaagtcacaaagaggtgttaatggctgaagacatcctaatatgtatggccctttgataacatattttacaggagccttttatgccttaacccaaataactgattctgacaatgagaattttagaatcgggctggtctgagttcctattaccagacactgtttctggtcctggggatactgtccccttacaagggtaatatttccggaccaaggccctaagatggaatcttgtagacatctgtctaaaccacctaagtggaaggttgccttcgaagaggctgcctgggagtgggagctggatttgaggacacctggtgcagcttgagtgcaaacaaaggcagacttggaataatccagctgctctccgaaggctgcctgtgaacattggggggttgccaatttaatcctaatatagaggagtgtctgcttcctgggtgtaggacagatgtgggcaaatcagatttttccagaagaccaggcagtgtgacacccattcttctggtgggaaaccggagccaggagggtttcaattaccctccgtaagtccacagaagccactgcaagccatgccccccttcagctctccaagtgtcagcttagcttagatgtttttggttttgagattttgagtagcaaagcaatgctgtgtgtcgctgctgtgcccgctctctccttgccctctttaagacgccgctaggttctgagaacagaaagccatggtggcgacacgtgggctccagcacgtagtccagaaagctgcacgtctggtgtgcgcagccttggagaggcggtgtgtcaggcagccgggctgccgcaatgaactaccacagactgagtggcttaaataacgcacatgaattttcctacagttctgggtaccggagtccaagatcacggtgttggcaggattggtttcttctgaggcctctgtccttggcttgcagacggctaccttcccgctgtgtcctcatgtggtctgtgtgcccgtgtccctggtgtccctcagtgtgtccacattccctctcctggtgtccaaggacaccagtcagattggattcgggtccatccccgattaattggtggttaattttcatgaaataacctctttaaaggctctatctccaaatacagtcatgttctgaggtactgagggtcattctacaaatgaatttagggaagacagagtttagcccatgacaggtattttgttgctggattcttccatttgtctcacagcagggtggaggagaagggtaagagaagccagttctggtcccaattcagccactcattcaccacgaatccttgggcaacacccttccactctgaggggcttggcctaaatggtttccaagcccactcccctcccacccacccacaactccaatgactcagcctcctgtgggaggctctctgttgcttttgtatgtgacttttcaatccttgcctataaactgatagcaactgcaaggcccccctccctctccactggcacccttgcaatgactgttgtattcttcagttactgtttacagaataataccaaaaccatgttctcctcaccgcaaagtaaaggaatcagtttttgtgcttggagacagatagcgtttccaaactggacaatcatttaggtaagcgctattccaatttttatcaatgtaattagctcctaattgcacttttctctctctagaacactctttctctgtcactgtgccaggcttgtttttggtgcacctggaaaaagtagaatccactcctaaatacaagttgattgtggactcagacatcactaggttcggtcttcactggccctgatgctgagctgctaaatgaaggagcccttagcctgggaagatgtggtttacacgcatcttaggaacaggttctcggtcattacctgtttgggggtgggtgcatgtgtcaataatcacatcaccatcacaatttcctttctgtctataaattcatctccgaatcagggcctagttgcagcctctcctcaatcaggagacttttaccaaacgttaacatgtacaaactcaactcagaaatcataaattagggtctcttcttcaatatacattctgatcttttgtttcctcaagcactgtaaaaaaatgggaggggtagactaataaacccaagtgtcatgatttatggaataaaataacttggggtaatcagccattaacagagaacaatctgacattggttcccccacacctggaacttactaccctacttttttttttttttttttttgagatgatgtcttgctctgtcacccaggctggagtgcatgtaagagttaaagaaagaggaggcctggcgcagtggctcatgcctgtaatcccagcactttgggaggccgaggcaggcagatcactaggtcaggagatcgagaccatcctggctaacatggtgaaaccctgtctctactaaaaatacaaaaaattagctgggcgtggtggtgggagcctgtagtcccagctacttgggaggctgaagcaggagaatggcgtgaacctgggaggcagagcttgcagtgagccgagatcgcaccactgcactccagcctgggtgacagagcgagactccgtctcaaaaaaaaaaaaaaaaaaaaaaagagttaaagaaagaggaaagaaccatgaaaagtggctcaatagtcaaagacaggtttattttggagaataaacctgagaggggcttctggacgatttcagtcaggagcactctctcttacagaccaagagtatttattggtgagacagcttggaatgtttctgtgtgtgggagaagtttatggcagggttggaaagtctctggtcagagaagaggttatcttggggctgacatctctctggttggagggaaggttatctcggggctggcatgtctctggttggggaagagtttggaatgtttctggtcagagatgtcatttgtggtttatggtcatgttgaccttagccattaggctgatgccctttgaatttaggtggtttttgatcaaggtgaactttaaaatggcagtgcttgtccaagatggtgaagctcctgctctgtcagtgcagtggtgtgatctcggctcactgcaacctctgcttcctgggctcaagcaattctcctgcctcagcctcccaagtagctgggatcacaggcatgcaccatcatgcccagctaattttttaatttttagtagagatggggtttccccatgttggccacgttggtcttgaactcctgacctcaagtgatccacctgccttggcctcccaaagtgctgggattacaggcatgagccactgtgcccatcctctaccctctttcttgtcccatgggtgagtcaatgatgtcctcccagccccaccagtgaccttcagaagaatcctgtgttaccagggctgcatgcagagctggggtgggggcgtgggggaaatccataggttgccacaggcttatcagtgatgtccctagagaatcacatgtagggggcacccctccttaatgtttgagtaactctcccttctccctagatacaggtggtctatcagggttctccagaaaaacagaatcaacaggatgaatatatagagagagaaagatttattttaaggaattagctcaagaagttgtggagacttggtgagtacaaccaaaatctgatggcagaggctggttgggctggagacccggtgaggacttgcagttcaagtccaaacttgcagtctcctggcagaaatcctggctgctcaggggaggtcagcctttgttctattcaggctttcagtgcagtggttgaggcccaccgacgttagaaaaggtaattgctttactcagtgtccactgatttaaatgttagtgtcatccaaaacacaccttcacaggacagttagaaaaatgtttggccaaatatttgggcagcaccatggcccagccacactgacatgtaaaactaaccattgtaagtggagaaaggacagcggaggccgggggagccacattccacctaaggcctgagcaaattggcacctgggctctgttccttcaccagctgcctggattttgggtatgagggccaattggcagctctccaagtcttgactttctccccacactcagtgaaccactttcatatgctcgtgtgacacttggaagttaacctgcctttggaacacagcactctgcctagggagtaggtgcacaggtggatggatgagtggattctgtctaatgcacctgtgcctgaggcccggctagcactgtgagtgtgggttcatccatggtagcagtggctgctccagtgtgccatagaagagacgaggctcagtggtcaccactacagggggtggagggtggtacgctggagccagtcagagccctcaccagggctgcttttgctctttgggttccaggcatgcagatgagtgaataggaactgggcaggtgcccctctagcatccacgtctcccaggacaggtgctagggcctcatgtccttggtactggcagagctgaggtctctggagtctcacatccctgaaccaggatcctggacctctgctctgtgaccttggacatatcacatccttctgggcctgcctccaccttctggtgtgtgaagccaggactccctgtgtgctcactgtggggctaaggttttctgccccaggtggccccatccttgaaggtttgcatgcgtgggctctctgtcctgctggttcagaggcctgagttctcatcaggtgctgctgcaccctctgtgtgttaccagcagccctcggaacttctgtcttttcattcctgtaatgggggagtgtagataaaatcacctcatcaggctctatccccagactctatacccaactctagaggctgtaagttttacaagcaaaatgcaaccaagctcaagtagtagactcctcccagcccctgcctcctgatggaggcacccagatgacaacactccaaagaatgtggaatttagctaagagatcagatacttgcagcaccccaaggaagaataagatttatgcataatggagtgcacatggctggcagtagcagtggggagacagttggaggaaggcagaattctgctgcctttatccacgagtgggtagcaagatggcaacagtgattccaaacatcctatcaagatgcaacagcttcagagggaagagaagggtggtctttttctctatgtttttctaaggaataaagacaactttcccagaagcaaccccagcagacttcatgtcatgtctcattggccaaaaccaagtcacatgcccattcctaaaccacaatctggcaaggggaacagggtggccatgtgctccagtttattaatatacaagcaattgccccaaaatttagtagcttaagacagcaacaatcatatcatgattatttctgacagctttaggggttggctgggctcagcaaggcagttctcactcaggatctcccaggcagttggagtcagacagtggctgtcatttcaaaggcttccctgctcattggtgtggcaattgcatccactgagacttcagctaaggttgtcactagaacatctttgcacacggtctcttcttaaggcctggtcttcctcatagggtgacagcttggttttaagagtgagggtcccaagagacaggcagaagcttcattgcctttctggaagcagcctttgaagttacctgatgtcatttccatcataatccccagacaacctaggtttatagagaagagaacgtagatcccaccatctcagatgtgaggagtgtcagagttccattgtgaggaacacatgagagatgggatctatggtagcaaccacctttgagaaacacgatctgctgtaccatgactggctttgactagtaagttattctcccagcctggagattctgaagttactctggggtgggacctgagggtctgtttctcttaaaagcttccaggcaatgtcaaggccatgatatgctctaggctctaggggtttagtcccagatctctgaaatttgtttaaagctctccagatggttctaatgtgaaaccagggttgagaaccactggcttagacctactgggatttatcactgtagctggggataaggccaccttctgagtctggctggggagtggtggcatcccaaacaaaatgcaagaaaaggagggagaatggtgctgggtggactcctgaggaggtggaagccccagggacctccccccactcctcgctctgtctcagcctgcaccagccccacctcctccgacaaggctgtgcctggggcaagacgccaaattcatgggctcatgcccagcccttctgcctctgagccctttccccaaggagctggtattcactggtattcactggtatgcagctagagcctgcccctggaaagaggatagagaacattctggagccaacgtgttctccagcccactgtcagggccaagcaagcagggatgcaagcagggatgataaatccttagaaatgatctcatagtctcgggctctgactatcaagttcaggtcaatcttcatcactggtctttgaataattcattttgtgctcagcagttgtgaaaaagaacaaggctcaaaggctttagaggtttctgattaggcaataaaggaaccacgtatcacaacgttcccagcagactaacttgggccaatttttactttaaatccacccacactcatacacctcccaccctatttcagatacaacaatgtgtgtgaaaacaccgtgtaaactgtaaagtcctctttggactaagttattttcattaacaaaatggtgaagagactaaattaaaccacataaggtgagtagcagctattcaatccatagcatttctcagtgtcctaaatgatcaattctggagagcatcctacaaggtctgtttacaggcttgggattcacccaagaatggattcaccatcttcaacccaggcacagtctcttgcaaatgtcgattcagatactacgacttcagcttcaaccccagcaggtcatcaccaacatcatgaccaccaacatgcatctaaagtccttatcagagtccttggcacataataggtattttgcaagcattatctcatgtaaccctttccatcctgtacgtagaatactgagacctaaagaagtttagggacttgctcatgaccgcacagctggtaatatttgcactgctctgctctgcaagtcctgtttcaagtgcacccccaagagcatggcacctacagtcctaaatgttctgcatggtaaatgtaccctcttctataatcagagaaataatccaggttcccatccaaagataaatgggggaaggaaaggtctaaatgcaaacaacggtgatgtgtcgtttcctgaaagcctctacacgttaatcctgactccttctctcccatctctactcatgatgccaaccaatgttggaaatggctccaggaaaactctggattttcctaactgtggtcagcccgtggtggaacctcgccacactcttgttctggataaattgaagcaactggagaaagactcatgacacaagtttggccatggaacatgtttggcgtgtgtggttaggggtcatctgatgcatcctaccaacgtgaccccaaggaaagtgctggaggaattgggctcagatcctagagatgagctcatgtcagactctggcctccagattccattttcctggctgactcccagggcaccatggagcaaatggccagtgggtgtgccatggcaggtgagacccgcccccccaacccggcattctgaagcccttcagctggagaggaggaagagatgtttcatttgttcacaatgtttcctgaagcactggaagcgtaaattcctgagttgatgggtgtgtggggtgcaaagaaaaaaaaagtgaagtgagaataaattttacttagatgcaagaagtgtcaccttgttgtgttaaattaagtctgtctgagcccctattcacctgggtggtgagaaattcagtgttccccagggttgcatgggaatccaatggggaggggatggcagtggctgccaggctagaaatccaaagtccagcggtgtaggtgccagggttcttgacacctgttgtcctgtgtcctcgtaaacaccatcccgccacccctctcaggccctgccaaggactctgctcactgctgctctaggaacccatcaattgcacctcctcactcatgtccttccaggtgtggggactgtccccatgcgttgactgctctccccgacctccaaggactcctttcaatctgtcacccccttgggaggatcctgcacatccttcctcagtggatccttagaaactcaatggtgggcttttttgcctggattgggggaagaaaaagtgatggggaaaatgaagtactcataataatttaccctgtgatcctattaataataaattagtactaatatattattttggttattgctactgtttctttagcacctactatataacagcttctgtcctgggctgtttctccggtgtgatttcattttatttgctttgaatcctagtgcagaatctgagttagttaccctctccagttcatgatgtgcagccattattggttcacataaggcctggctcttgattttttattcattcattcattttttttccttccccctccaccccatgagcaaccattcagatgtgtttaatatatatatttttgtttctatgtgctccttaaatgtatattgttttctggcatgtgtattttaatttaaataaagggtactgcattatatatgcatctctctttctcactttttcatccagcactgcttttacaatcttctgctttcctccatgaacatatagttcattgctcctaactgctgccaagcactccacagcctttactttttgcctaaaccccagtgaaaatctcagtaattaacaccaggaaagtgggatttggaggccagagtctgacttgactcatgtttaggatctgacaccaattcccccagcacttctcttaggtagggttgcttccaactcccctacaacacacgcaccaaacagcactgctgaaaatacagctgtccgtctccccttacagatctggcaaccatttcttggggctacaccggggggtggatgtaatgcatcgcaggctatgtttgcacttaatttaatccaacacgttctcattgttcttcagcaaagatgctccagttcatactccccgtgtcccccatccccgctaaaacagcccagaattcctcagtctcaacactattgacattttgagccagaacattctttgttgtgggtgctgatctttgcattgcaggaaagttcagcagcatctctagcccctactcacaggatgccagtagcattcgtatcctctgcttgtggcaaccaaaatctccaaatgtcccctgagcggaaaactgtctccagctgtgagctacctaggcttccctagctttctcctttttgtcaatgtagtgggttccaccctacatttccagcaatcctacagccacactaccctcaaaacccctgatctcagaagtgaagcagggtcaggcctggttagtacccggccggtagaagatggtacaacgaactccctggtacccatcactcagcttccacgaggaccaactcatgtctgaccccagattctttagaagcaaatcccaaacatcatatcacttcttctgcaatgatttcccgccatattggcaaaaaatcaggattcttttaaaatcacaatgccaataatacacttaaaacaatagtttcttgatgtcctcaaatgtccagttcaatgttcagattttccttattattattattattatttttagatggagtctcactctgtcgcccaggctggagtgcagcggcgcaatcttggctcactgcaacctccgcctcctgggttcaagcaattctctgcctcagcctcccgagtagctgggattacaggcacccgccaccatacccggctaatttttgtatttttagtagagacagggtttcaccatattggccaggctggtcttgaactcctgacctcgtgatccacccgcctcagcctcccaaagtgctgggattacaggtgtgagccactgagcctggccgattttcctagttattatctaaaacatgcatatgtgtcggtgctttcctgtttatcaagacccatgtaatatcctggcctcacaattgctttcaggtctcttacatttcatccttgagtttctcagccttacccactatcagtcggcccatagcccggaatgttctgactgtatcaccctggggttggtgaatgtttccctccattgcatttcctgtgaattggtagacggatctagaagcttgattggttgcaggtctgacttgttgacagtgaaactccttcaggagacatgtgacacctggccatctggctgtctctttttttttttttttttttgagacggagtctcggtctgtcatccaggctggagtgcggtggcgccatctcggctcactgcaaactccgcctcccgggttcaagcaattctcctgcctcagcctcccaagtagctgggattacagatggccacacaacacccagctaatttttgtatttttagtagagacagggtttcaccatgttggacaggctggtctcgaactcctgacctcaagtgatcctcccgcctcagcctcccaaagtgctgagattataggcatgagccaccgcgcccggccgtggctatctgtcttccgggaagttagcagtcattaatagtcacagcccaggttcattacgctgttagtggttgcgcagaggtgatgttctaacaccattctttcttcattatgagctggagtactgctgttctgagaaaccgcccttcaactgctctcaagtttctctactttggtcctcattccaccctgtggctgcacacaactgccctacagatgcacccaggccccagtgcatggacatggagaccgtttccagcaaaaacatccacctgtaacattctgccagccccccatcctcagaagtcactctcatcttcatttttcacaaatctccaagtcgtgaatatttgtgtccttatcctttctggctcctgtgtttttcttctgcttcaaggccatgaaacaaccacattgagacgtctcctctaagaagtctgccctgattcaatgtctcgagaatggccacttctttgccaggttttggagaggcccagggcaaggctagaggccattcccagggaggctgggagggtttcaagtttgccttggcacagagcgatgttgccgggagctaacacccccacttctgctcccacgtggagaggggcctttcctggaggcccccgccagctgtgagtcaccagctcctgagccccaaaccccatagaagaaatgcaaatggattctggtgaatagagaactcaagccacctccgtgtgggagaggatgttataatatcaggctgtcggcaaattaacgttattaaacaaatgcaccaaaatagcagccataattattcccatacagtagctcaatctggaactttcagggtgtttttgttccccccccaaacacagggctgtcgctgctcctgtggtccttcctccttccttctctgcaagatgctgcagagcaaaggggcctcaagcaagctcccagaacctctttgtttccctgggaaatgataaaatcatgggagctaagatttcttcaacacctaagtgccaggccctttacgtatgaaactcgatttacaacctgatgaaggaaatgctgttgttcccattggacagattagcaagctgagtccaagagaggccatgtaacttgccttgcggtcactgggcttgaggatatgaacgcctgggcttgagcaacctctgacctttgccttttgctctgacttgctgctccaaatgttcttctccccaatatcttcctctgtctctctagagacgcttcacctcaaagtacctgcccatggcaccatggcttttgaaggctgctctgttccagggagctccgttatctccctgctcggggtggcctgtgcccagggccaggtttgggccagggtcccttgcaggagagcagaacagtggggatcgaggaggggtgaggtgccagcagaggccagcttcctggcaagttggcatgaggacacaaggtcatgggggaggtgagaggcccaggaagggggtgccccaagcacagatctgagcatcactccagccaggctggccaggctgggcacatgattgcaggagcctgtgtcctgcagcaaatggggcccgtcctggcagcagcccgctcctcgctctgacaggcggatcagtccccttctctgagcctccatctccgcatgatgcctgcctctgtgtcaggctatcaacatcacacgttatgcaaaggatgcatgtgacaggtgcccattagggatatcactggggctacagccataaagggccttcccaggagccacattctgggctggaactgggtggagacagcagtcaagcccaggtcttgcccctttgtcctcaagaagctgtccagggagcagagaagccatgattctgctgtcgatgactcccgtgatcaccatgcggtggatgctgtgagcccacccggatgtccctgctgtcaaggccatgtcactctgggctactgggaggactgtcctcaggtgaccctcagccatcagcccttaccctgggagctgcctcagctgcagagcgccacctcgcccttggtcatgccctgccctgggcagtccatatccagggaccagtgggctggaaacaaagtcgtggcaatctcaggcaactcaggataactctgaagggctggtctgcctccagcacaccctaggagtggggcctgctctgcagccgggatccccccgccctccacccatcgctcctcccacccttcctttcccaagtgcctggctccaggacatccccaatcccctgccagctctttctccttgcccgctttctgaagaatccaacctgcaacatattatcactataattgtataagtgcggatgatgtcgcccaggattgcttgcaggtgagcctaagttgagagaaattgcaggcagccgcaggagcatgtcataaggaacaactttagtttttgcctgcccgagggccactctccccttcttttggccaaggagtgaggaaaggactcaggctgggttatagttcctcatcccggctctgctgatgaggggtaaggttgggcagctcatgcagtgccaggcaccaggtcaggccttttgtgaacatgactgcacctaagcacatcaatcatgggtccccatctcacaggattaaagagatcacttgtccaaggttacacagctaatgagtggtggggctgggattcaatgtttttcacacgaggctccgagggaccctgggacattcatggggtccctggagggaagagtgtgaggaggaggtgaagaggaggctgagaagaggaggctgagtaggggaggctgagtaggtggtgctccccagccttcaacggcggcaactcaacctgcacggatttcacatgccaggcagatgccgccctgtgccggcatctcaggcagcctgtgcttgatgttcccaatgtcatgttgacttttccacgcagaagtggttctggaatcagacagctccaagcagctgacctttcctgcatgcaattctgtctgcttcaagtcacttcaatctactgattttgctctgcccttaggaaccacaccaaatagaccctgcttttcaacttagcccctgagagtagttacctgtcctcactgagtggccaaccatgtcccctccctcttttccctcctgtgggtgatgtgcttcagggatgtttcatcatcctgctcactgtcttctgtagaacctccagattgcaatgtctctttaaagtataatttccagaattgattaaaaactccagcaccaaatgccagggactattatgtttcttgacgtgggcttcgtgtatttgctcattttgtttgttaagaaaatgtcctaaacctgtaatctccaatgcacaggtgatctgcaggtcagtagtgcctaagctgtcttcaccagcctgtgcatggaaaattggtttggggagccagaagtcaatactttacatttacccctttaccaaattatacctttgaccattgaacatagaacttgcacctgcgaagagtcatttttttcccccaaattcatatgcttacccaattttatcagggaaaaaagctaacaattctgccctcttatggccaatttattattttcctcttctttaacatattttcctggaacagaatgggacaagcgattccatacatagtttggacattgtgtagcacacattttctttaggataactcccatctgctggtggaaatggagaagaacctataataaggtggccggtgaggatagtttcaggagcctgcctcctaagccttagctgtccacccaccatgcttggcaactgtggctgccctggaaggcagaagaaacttctatctacaaagaacctccaaaaggactagaaatcagcctccagtgcttcctatttaattctgaaacaatcctatagaaacaaacttacagaaaagttgcgagtccagaacaaagaactcctttgtaaaggagggctcccaggcttttatggtaaatggcaccctcaggtctcagaaacttcttcacagcactcctaggccaaaagcacccaacaattctatttatcaagtacaaacaggccccgacttgcgttggttcacttatgatttctctgctttacgacggtgctgtgaaagtgatacacattcagtcaaaaccatacttggaattttgaattttgatcttttcccccgctagggatgcacagtgcaatactcccacatgagatattcagcacttaatcataacacaggctttgtattagatgatgttgcccatctgtaggctaatgtaagtgctctgagcatgtttaaggcaggctaggctaaacaatgatgctcagcgaattaggtgtattaaatgcattttcagcagggcatggtggctcacgtctgtaatcccagcactttgggaggccgtggcaggaggatcacttgagctcaggagttcaagaccagcctgggcaacatagtgagaccctgtctctaattaatgatttattaaaaggataaataataaaaatgcatttcaatatatgatattttcaacttacaacaggtttattgggacgtaatcccatagtaagacaaggagcatctgtagttaggattctgtgcctcggtcctcattccacccaggagctgcacaggctctgctgtgtggaaggccccaggccccagtgtagggtcacagggatcgtttccggcaataacatccacatgtagcatctgcccacccccctccagaagccactctttcatcttccttttttggacacaaatctggaagtcgtgaatattcatgttgttattcttctggcccctgtgcgttccctctgctccaaagccatgaaacaaccacatcacacattcccctctatgcagtctgccctgattaaatgacttgagaatggccacttctttgtcaggttttggagaggccattctcagggaggctgaatagtggtaggctggtagatgttgctgtgtttccgtcaaacatttaaggtattctggccgggcacagtggctcatgcctgtaatcccagcactttgggaggccgaggtgggtggatcatgaggtcaggagatcgagaccatcctggccaacatggtgaaaccccgtctctactaaatatacaaaaattagccgggcatggtggtgtgtgcctgtaatcccagctactctggaggctgaagcaggagaatcgctcaaacccaggaggcggaggttgcagtgagagctgagattgcaccactgcactccagcctgggcgacagagcaagactctgtctcaaaataaaataaaataaaataaaataataaaataaagtatcctatggcatttctgagagtttactgtagtgccctggggcacctcgaaacatggcttgggaaccgtggttctgggctagtaagttgccagcttggtgccccattatccttaaattctttagtgtgtgtttcctgcaaaaggacattctcctacacagcctaacacattcatccccaccagaatccacaacaatgcatcgctaccattcaagggccacaatggaggtcggtactgagactcacagtggaccaaaggagggagtgaccagcaagactgatgggactcttcgcaaagggaaaagatgaatgggagtttcccaggtgggaggggacactatgccgtgccacacaggtttagggaaacttggcgtgtttgggaatgcaaagttccctaaggctggagcttaaagaccagagacatatgttggggccagagacaaaagacccttgaactccagacgaaggattgtgaacctcatccaacaggcaatagggagccaaaagacatttcaggcagaggtcaggcaagccagcttcatttctgagaaaagtctgctgagcagtagtacagatggtggaaggagtagggagagaggctgggctgggacaggagtcggggccactcgggagcccaggtggggccagggggctggagggcagccccctaaggccaggacctgctaattctcaacccacacgagactgtgaagatggagaccagccctctgctttgtctgcatcaaccctgcacctcatcgtgtattgtaacgtagcatagtgtaggcaatctcaaagcagatccgtccaaacacaggtgtgagaaactgaccgaagccacgtggagaagttcagctctcaggacacagcacatctctcagttaattttggaagctctgaagtcagaggactggacttggtttaaggctctgccatgtgctagctctggggtcccagctactcacctcacctctctcttcctcctaacttaacaaaaggataataagaatcaactttatgagctgcaagaggattcaaggaagacagccctataagattcttagccagtgcccagcacagagtaagagtaaagtaaatgtcagctaataccttcacagttcttgaaaggtctgtgtctcaacagaggagtttctttcatcacagaccaagccaaggactaacagtttgtgtaatcggcaaattattaagaagcaacatgctggggctgggaactcgagatgaagatggagatgcagttggagcagggtgggtgtattagcctgttttcatactgctataaagaactgcccgagactaggtaatttataaaggaaagaggtctaattgactcacagttcagcatggctggggaggcctcaggaaacctacagtcatggtggaaggcaaaggggaagcaaggcaccttcttcacaaggcgggcagaaaggagaagtgccgagcgagggggaagagccccttataaaaccatcatatctcgcgagaattcactcactatcagagaacagcatgggggaaaccacccccatgattcaattgcctccacctggtctctcccttgacaggtgaggattatggggattacaattcaagatgagatttgagtggggacataaagcctaatcacatcaaggctttcaggctgcagaatgggaagctggaaaggaaatccagaatccagcaggacgctttgactcaaagaactgagcaagagcagagactaagcagaggccatagggtggatagatggatggtggaggggagtcaggaaaggttctggagctggcaggcgtggagcagagggcagggatggcatgaagcagcgtcacctgcctctgcccactcagaacacagaagccccgcccgccgattcctggtgtcctcaaaaggcagagggaggcaatggcagcattcatggccaggctcagaggccacaccctagggagtctggggagagggggaatcatccccgggacaatcttggcccagctcctgggggcagcagtgagggcagaggggagggatgcaagtcggccggcatggacccacacatagacgccttgacagaaagagaggccattcctacattgcttcttggttgaagtcattggtacgtgctctatgagagaaggggatttcctctgggagaggagcctgcaatggactgaatgtgaatgtccctgcaatattcctgtgttgaaatcctaacccctggtgtgacagtgttaggagatggagcctttagcaggcaactgggtcacgaatggggttactgcccttattaaagcgaccccaaagatggacccctctttccatcaagtgggaatacaaagagaagccagccgtctttagcccgaaagagggcccttagcagccccggaccacgtaggcaccctgatctcagacttccagcctccaaaactgcgagaaacaatgtctgttgtttagataccacccagactatggtactgtgttgcagcagtgccagaggactaacagaagccccaaagatgattaaaattaaccaaagataattaaaattaaatcgatttttttaaaagaagaaacaccaaaaacccactgcagttcaaacacacttacctggacagaaaatttttagggaaaaaaaaagatagctgcaatacacacacacacacacacacacacacacacacacacacaccccaaatgccaagcttctgaatgcagagcaggtgtgtcccaccgggaggacattgccatcaggaggctctggctgataattaagctacaaacatgtacagaggcatggctgtagccagagaacattgtagatcattaggaaatttcaccttctctagctaaggagaagaaaaatgtggagaatctagcaatcgcctccaaaagctttcgcttagtgccagtacaatctaagaacaaggaaggggtcagagaagggccatgacagaaggagaggccaggagggggcaggccccgggcacagggtttgagcccctgtgtctgggactgtgggagaggactcgctgatagcaagttactgctggcagagttcccattttttcagctcttgcccctggatctgggaatgtgctgctcacttcctgtagtctttctgcctttgagaatgaatttctaaacagtaaagatccagctctatgaattcaccagccatgacttcaaaacaagtttcccgacttcagagaggcacacctgtcattgacttggggggccatttagggaatcaagtgcccctcactagggcccagctggttggcatggaaaccctcagtgcacagatgcaggctctggcaggttctggcatattctggggcagagcaaactcccccgctgttctgatgcagcccatcttggcgccctggagcctgtccatggctaaaagccaaaccacgtcaacgttgagatattttccaccagcacgttatcactcaacaaataatgggaatgctagacattgagtaaataaatacgaatttgaacaggggacctaaagggtttgctgaccagtggggtctgtggtcagggaaggcttccctgaggaaatgatgcttaagcccagtcctggatgaatgagtgagggctccccaaggaaaggtcttggacagaggatttcatgggactgtcatgggaaaggctctgaggtgggcttgagaaactaagaggagcccaggatagcaagcaggagagtggaagaacataaggggtggaggctatggttggggtgaaaatgcaggcgataactgttgtgcccgttacttggcattttttaaagggggcaggggtgatgagcacggtttttcataaaaacagtcaactcctgccaggtgtggtggctcacacctgtaatcccagcgctttgggagggcgaggcaggcagatcacctaaggtcgggagttcgagaccagcctggccagcatggtgaaaccccgtctctactaaaaatacaaaaattagccagggatggtggcagttgcctgtaatcccagctacttgggaagctgaggcaagagaatggtttgaacccaggaggcggaggttgcagtgagtcaagatcgcaccattgcactccagcctgggcgacagagtgagactctgtctcaaagaaaacaacaacaacaacaacaaaaacggtcaactccaaacttctcccaatccagacagaccagttcacaagggcctaatgtctttctctaccaggtagagaacggcctgatgaaacagtggctattttccccaactgcttacatgagaacacagagtcttggagaatccaaataacttgccccaaaccaggaggccaacatgtgaaggatcctcagatttggaataagatttgtctgacctaatttccgtcctggcacaatttgcgtgccgcctgcaactgagttttcgttgaagggtcactcactccgccattgagtgatatttattgagtggctactgcatgccagaggctgttctaggcagagccccggcccttgaggagcttatcttctggcgtggggatgagaggatggaatgcaagaaccacagaacacacacccatcacaggcgtagtgcaatgatgaagatgcaatgggatcaggtggaggagactcaggggaggcctgaagacgtgacatttgggttgagacatgaatggcaggggacatttgtggactccattaacaataagggttgtgattaggttcagaaaatggcggcttaattcacatgcatgtgaaatgtggcacggagccatggtcaaggtcgcctcctcagacgcaaagggagacgctccctctggtgtccagatccagcaattgcagggattgagccggcagaaactcaaaactcggggtgtattccacatccgcagatacacaagagagatacaattccttgcataaccccctgcaattcagaggcagtacgatgagtgttcttaagccataaatcagtaaacatcccctaaataaataaataaaaatatctaaacttcacgtagatctatgcctgcacatgccatattttttgcaacatctaggtatcacttgtgatcttaatatcaacctttttcctgtaaatcaacttgtttgctaagatacatttcatttaaaagaaaaatcttttgccacctcctacagtaaatggaaatccaatatcatgcaccaaaaaagtagaagatagccataagactaatccacgcaacaccaaatcacatggtttgatttcttctggacctcaggcctggctctgtgtttgttacaagggggagatcagaaagtgtggctggggtatgagagataaaaaagcaagactgaggcttgcgttaattaaagggcctgaaagacactgagaggagaataattttctcattgggagattggttattatttaaggtcatgctcctgggtccctaaagttctggggtgcaatgccctggggactccaaaaactcaagactatgcatgttttcttgtccaggcacggagttgacaaggaagactggaaaatggccctggtgaccataaaccaactcccacccctcactccccctcgggcccagagtggttaattgagtattaaaggatcacacaaggaatgataaacctgaagagaaatggggtctcctgattcccactccagtgctctttctctgcacctggggaggccagtgtcatccgttaaatgcaataaaatcctccttttttttttttctggacggagtctctctgttacccaggctggagtacagtggtgtcacctccgcttcctgggttcaaatgattctcctgtagcctcccgagtagctgggactgtaggcgcacaccaccatgcccagctaatttttgtatttttagtagagatggggtttcactggtcttgaactcctgacctcaggtgattcacccacctcaggtgatccacctgccacccaaagtgctaggattacaggcatgagccactgcacccagccattttctttttttttccctttttttttttttagacagggtcttggttgcccaggctggagtgcagtggcatgatcttggctcactgcaacctctgcttcccgggttgaagcaactttcccacttcagcctcttgagtagctgggactacaggtgcatgccaccatgcctggctaatttttgtgttttttggtagagatggggtttcactatgttggccaggctggtcttgaactcccaacctcaagtgatcagcctgcctcagcctcccaaagtgctgggattacagacataagccaccgcacccagccaaaatcctcctttcatacaactatgtttcatcctttgaaagctacttcacaacaaatctgagttatacgtatgactctgagtacttcttactaagtttgtgcatcatgatttagtagtcaagggggaagtaatggagaagtgattatacaaacataacctcccaaagtagaattttcagagaagttaccatgtgcaattgttctccagaattcatctcacggcctaattcctcatcattctggagaaacaggtctttttctgatccacttggagacttgagactggatggcggctggaggaggctgaccagacggtgaccaggaccaggatgggatttcatagcaggcagatgtaactcaccaacacgctgccagtgccaaatgtccctaatcagtcacttgccaattgccatttttagcccagactatacatttccaaatcctaaggatctgcttataaaacctgattggaaatgagatcaggaagagcagacacaatgtaagaaattgggaagctcaagctgggattcccaagactgaagaaagccaagttgttttctgagcatggggacaccatccggaccaagagtgggtccttcccaccttccctgggacccctccatgggagacagtggaaatcagcatgctggcagcctggataatgagatttccacttctccccagcttcatctgctcttctgtctgctgaagctctcagctggaaacacagaccctaaagggacagtggccttgacttcctggtggggaaaagggtgaaaggcctggttaagagattgctttgctacaacatctggaccagagcttttgagctttctgaacttagaaggtgcagaccttgttcttacaaggcccacatccaagcgattatatggttagtaggtgctgcttgagaacacacaaacccactaaaatttactattggatttcattggactgtggaataaatgtgtagtttattcatcacaacagcttctacccaactgtgaaaacagtcatctgtgcacatttgagatgcagggttatgctctgtctgtgggggcagcttgtccacgtgaactctgagactctgacagctggtcactgtccctttggagtctgaggtccacttcctgggagtctcttctgctttagatcattcatacaaatagcatctataatgcagagacatggggactgggctccacaccccaccctcagcagtcattgatgtttgagcttaagtgatagtctcttttttcaactcagggtgtgtggctccagaattttagatgaagcaattgttttggattcatgcaacctaaagaggttccctccaatgacctggggttaggtgttcatctcccctccaccacctctgcccagactgagcagataattgaggtgagtgggtcttgggtcaggttggcggggacagaggaatggtgagttagcccagatatacaagacctttgctttataaatttacaagggaattgcctgatttgagaatttaagtggattccaaccctttgccctttcactgtcaaaaatactgtaactcttactttgcataataatgtttaattgtgtgccgcacatttcagagcatactgaacatgcatctcagggcagagaatggcgtgtgcaaagcaggaattttgcacttattagacacattcaattatgttcaagggtaaatctcatcaagctgcattttctccttagatgttaacttttagatcctgacccctgagaaaggggttaacgttgcagtatgagagcagggaggggtagacttctatcacagcattgagggcgacaaaaatgaatgatgataattgcggaaacttttagtgacactgggagacagctctacagcactggggattatgttgtgaatggtgctcacgtatttagtttcacatttttaacttcttcaagtgggaatttaatttttttttttttttgacggaatcttgctctgcctcccaggctggagtgcagtggtgcgatcttggctcactgcaacctacacctccctggttcaagcgattctcctgcctcagcctcctgagtagctgggattacaggcatgtgccaccatgcctggctaatttttgtatttttagcaggctggtctcgcactcctgacctcaggtgatccacccacctcggcctcccaaagtgctaggattacaggtgtgagccactgcacctggacaggaatttaatattaaattgcccaaaatttaattatttaaaactgctacagatacaaaagattgaaaaccattaaatggaaattttgaggccaaaaatcggttcattcattattcattcaacagatatggattacactaacgtgcaacccgtgtgtgtcaggccctttgttagagctgggacagcccttggcacccccttgctaagctgcaagttcccagaatctagatgcttgcacccgggctgtcacggggcagaggccaccaaggatgctcaaactgttacatgtgcctcacgcccacctgtggacaccagtgggtgaagagtgggtttgactgtcccagagctttagtaaggcagcttcatggtgtctcggaaaaagaactcaggtctgggagcaaggagctccagtttctcaccccagctccgtgcagctcttgtgtggtttgcacgcagtggtccacgcctggactcccgcccctgtacccaggctctgcctctcacctctgcacactcaccgggcacacctccagccctgctgaactcaccaccttgcggtcatagccggggccgccaatgggtcctcagagctgctggtggtcgggctctgtgtctcagcctgttcagcccccggccacctggtcactagcttggacttttctcttctggcctcaagcccccaacaccttctccatctcagcagactgatcttcgtgttccttcactgaggaaattgaagcagccacctctctgctgacatccgtgtcacctgtgccatcatccctcctgtcactgaggatggcctgtccatgtccccctcctgtttcctggatcccaagaccccactcaaggccttggccccagccacccttccctcttccccgtatcgctgagtttccctctgctagactcttcttgcatggttcgtttcccatctcaaaaaggaacagagcagaataaaagcttttctggccccctcaaaccctcctgctactgcccagttttatattcactgcctagggctccttccctcccatcctctttttttttttttttttttttttgagatggagtctcacttccgcctcccgggttcacaccattctcctgcctcagcctcccaagcggctgggactacaggcacccgccaccacgcccggctaattttttgtatttttagtagagacagggtttcaccgtgttagccaggatggtctcgatctcctggcctcgtgatgtgccctcctcggcctcccaaagtgctgggattacaggcgtgagccaccgtgcctggccccccacccatcctctttttaacctgtccatcagacttttgcctcaaccactacactgaaactgctgtcatcggcgtcaccagtagtccccacattgctaaattcaatgccggccctcaggacagtttttgtttttgtttgtttgtttgtttttgtgagagaggtgctcactctgtcacccaggctggagtgcagtggcgcaatcacagttcactgcacccttgacctcttgggctcaaccaatgctcccgcctcagtctcctgagtagccaggactacaaggtgccaccatcatgcctggctaatttgtgtatttttggtagagatggggttttcccatgttgctcaggctggtcttgaacttctggactcaagtgatccaccaatctcagcctctcaaagtgctgggattacaggcatgaaccattgtgcctggccaggatggtcttttttgacctatctgccatcagatacagttgattaattcctcctcctcgaagcacgaccttcatctgtccttcaggatacatccctcccagacactcactctccagccccttccctgactcctcctcatcgaaggcttccagggctcagttccttgacgttttctctcctctgtacttgttccttggggagtccatctgatctcatggtttacataccacacacatgtctacaccgacacatcccaaacatacatctccaccgagacccagcccctgagctccaaaccccagttggctggttgacttctccaccagaagagctaatagacatcactcatttaacttctggaactgaacttctgactccacccaaaggccactccccgtcagtcttcctaattctcgtaatgactgtgccattcttcattgctctgagcaaacctcttaggatcttttttagctctttgcttcttcccaccttctcccaacccaatcatcttggctctaccttcaaaatacatccagaatccacatccactgatagatgaatggataaacagaatgtggcttagtcacacaatggaatattgttcagcctttaaaaggaaggcaattctgccacatgctgccacatggatgggccttgaagacactagactaggtgaaataagccaggcacaaaaggaaaaatactgtacaacttcaattatatgaagtacttggaatagtcaaattcctacagacagaaagaagaagaggggttgccaggagctaggggagtgggagacggagagtgagtgtttaacgaagacaaggttacagttttgcaggatgaagagttctgtggaagggaggtggcggtggttgcatagcagcgtgaatgtatgtaaggctactactgaactctgcactgaaaaatggttaagatggggctgggcgtggtggctcatgcccctaatcccagcactttgggagactgaggtaggtggatcacttgaggtcaggagttcaagaccaacccggccaacatggtgaaacacctactaaaaatacaaaacttagccaggcgtggtagcacgcctgtagtcccagctacttgggaggctgaggcaggttgaacctgggacacggaggttgcaatgagccaagatcgtgccactgcactccagcctggggtgacagagtgagatcccatctcaaataaataaataaataaataaataaaatgtttaagatgataaattttatgtcttgtgtattataccacagttaaaataaatttttataaaacactgggccgggcgcggtggctcacgcctgtaatcccagtactttgggaggctgaggagggaggatcacaaggtcaggagatggagaccatcctggccaacatggtgaaaccctttctctactaaaaatataaaaatcagctgggcatggtggcatgtgcttgtaatcccagctacttgggaggctgaggcaggagaatcgcttgaaccagggagttggaggttgcagtgagctgagattgtgccactgcactccagcctggagacagagtgagactccatctcaaaaacaaaacaaaacaaaacaaaaccaaaaaacccacctagaatctgatcccttcttacccactttattgctaccatccccgtccgagccacagacaactctcactggaattattgacatggtctgtggtctccgccagcagccaggaggatctcgggaaatccgagccctccatagctcccctctcaccctctgggttacagcagccttacaacatcagtgggctcagctgctggctgtctccaaatgaggcaaagagaaggtcagggccgaagtcctgggtctgcactagaggctgcgtgctttcctggcctcacctctcacttcttccccctccgtggatccccccagcatgcttccctgccccagggcagctgcttcctacccctgaaactctcttattttctttctcttttttttttttttgagacaggatctctctttatcgcccaggctggagtatagtggcaagatcacagctcactgcagcctcaacctccgggctcaagcaatccccccaccttagctccctaaagtagctgagactacagatgcacaccactatgtctggctaatttctgtatttttttgtagagatgggctctcactatattgtccaggttggtctcaaactcccgagctcaagtgatctaccctccttggactcccaaagtgctgggattataggtgtgggccacctcacctggacctgaaactctcttctaatcaatatctgcttggctacccctgtcaccccttcagtcttttctgaccttcttggccaggccttcccttgctggaccattgaacattgcaactccagccaagcaccccctacctctcttcctggactatttccctccacctgcaaacacccgacacgcttagcattctggtgtgttcttcactgtgtatctccctcactagaacataagctcacgagggcagggatttttgtctactctgatcactgacatatccacagtgcctaaaccagggcgtggcagatatcaggtggtcaataaacctttggtgcatggaaaagtgagggaatccatggccaagttatttcaccccatgatgcttctgtgaggccgtccaggatggtgctttgcaaactttagaatgtgtcataatgacacagaaagctggtcgagtggacagctggactctgccccagagattctgctttggggtctcgggaggaggtgagatgcaccatttctaagaagtcctgggtcttgctgatgctgtggctggtccagtatttcactgctgttcaggggttagatgaaaccctggggcagggagagggaggcaggcacctaccagggacagtggtatgatgagagcctcccttgtgccaatggagctcccactggctttgccagcccaggagggggagcctctgcctgctggaagctctgcagaagtgggaggtggaagggaggctggcaggagccaccccggaaatcagcactggggcagcactcagccctccttcctgccagggtgtccagcccagacttgacccactggccaggaaatagcaggagatgtgtccttggtgcacaagcagcccggaaaaccccctttgcccccgaaaaccagttgtcgtcactttaaggaagcacttatagatcccacgcaggtcctgagccgcacccagtcacacaggtgccgatctcacctgcattctctctgttcatttgtaattccaccccctcctccccatcttcctcttccttctctctctctctctctcacacacacacacacacatgtgcacgcacacacacacacacgatcatccctcctaactcctccacctcacacacagaaggcatgcatccctcatcccacccacagaagtccacacgcaagtgcacccctcacatcttacactcctacctctcccacaagcatgcacacgtgtgtgcctgcagctcatgtacacagaaaggcccaaagggtctctgccaatctcctcacccacacacacctcgaacgcacctctctccagaaagacacatatgcaagcccagagcctcacccatacccatgcctgacacacacacacacatgcacacaggcacacacacattcttgagcacatgcatgcacgcacacacagcatgcacacacaggcgcatgcacacacggacatgcacagacacacgcacgtgcacaggtgcacacacgcacacaccaccccttcttcccctaagtcttctctaggagtttttggtcctagctttgctctgccatcttgaagacacgtcccacagggtatggcttccgtcacgcccaaattcctgtcctgagccttgatctgcccaccctcaggcccacctccgggagaggagatgcatgctcaggatactctccaggagcagctaggaggcggcattctagaatcaacaccactcatttctgcaggtgcaggggaatcatcatcctgctagcaagcaaaggcacctgtagtctgctgggcgctgttcagaccccaggaaatgagaaataagaagcttcaggccctgcctttaaagagctcacaatccaggcaagagagtagaggggcagctctggatgttaggtgctattatatggttactggagaccctggggacccagatgggagttgtcagacctgcttggatggactacaaaggggaggatggttgggcagggccttaaagagtgagcaggcatttggccaggcaggcaaggagcctaagacactccaggcagcagagaaaggacagagacctaagtgagcttgccccccttggggagctaccaatcgttttgtgtgatcacagcaaggcagggaggtggagggcaagtggaggatgcgaggctggagaagtaaagggacctcatcactaaggagctggtgcaagactacggtgcttgggcagccttattgtttgggtgatggagagctgttggaagtcactagatttgtgttacatgggggtcacgctggtggagacagaaaggagtgggaatggtactagagatagaaaggcccagaggcacccatggatatagcataggattagatttggctacaaaaaatccaaaataatagtagcttaacaaggtaaaattcttaattctctctcatatccaagaagcggggaggtatggcttgtgtggctctcatggtatcagggacctaggctttctatcttgttgttgtgacacaaagggattccattcctataatcatgtgatccaaagtggctgctggagctccaggcatcacatctacattccagttagggggaaaagggaaaagaaaacaataccttctatttaaggacaattactaaaagttacctatacaaattatcttacatagtttagggtgggatgtagtcatatgggtctcaccttgctacaaagagaggctaggaaatgcagtctttattcaaggtggccaggtgcccagccaaacactaagggttctgtgactatggcacttggtggtggagtggtcgtgagcctggctttagctgggaggcttctacactacattactttgaccaaaggcagacacatgaacacacccaccttcctccctcagacgatattctctccaaactgagctgcagactccaacctcttctccgatgatgtgccggacatcatagggaacatgagagagatgtaagacggtctgcaaagcttacagtttccttcaagagtccaaaaaaaggcacaaaatagacaatagaaactaacaagaaacaagcaccccccaacatggatataatccatgtaaaacagatggttctaggcataagcacccacgatggttccaaaggggaaaggtcagtggggaccccagagtcaaggagatgggacccacaaagacccaaagaaagctggtcccaagaggaaaaagaaaactttcactctctctttactatattattattattacattggctaatagggcatagcaagccaaaggtgcagggtagcgtgcaaagaagttgtcagtcagaataagggctcactttgagcctggtcatttttttttttttttttttttttttgagatggagtctcgctctgttgcccaggctggagtgcagtggcatgatctcagctcactgcaacctcccgctcccaggttcacaccattgtcctgcctcagcctcccgagtagctgggactacaggcatccaccaccatgcccagctaatttttttgtatttttagtagaggcggggtttcaacgtgttagcgaggatggtctcaatctcctgacctcgtgatccacccgcctcggcctcccagagcctggtcattcttaaacagtgggcagaatctcttgagagtctttgctcaactgagagcatttacagaggcccatgtggtgggcaggatggagtgatcctccagtggacttttctgaaccaccttggactcttgcctatcggctgctatgtccccacggtcaggctgcaggcacccgctagtcctcaacccctgcggagcttccctggctctgctatgtgaccctcaccagtggcccctccaccttgctttgccccctggtgggccccctcccatcctgctctctctggttgagaccctttgcctttggcttgtcctttgccttcttgcctctcagccctatccttgtgtctgggggcactggtcttattgctgctgctgctgtgtttctgtgtttttttaagctatccctttattccaagcccaaaagccttgttatagctcctgctccttgaaccccaggctgacccagagaccaggtccagctcgggaagggaactgggaccttcttcctgttcctccctgctagggcattagcatttccccaagatagttttgaagactttgcttggcttgggaagccagcgcagtgagccccacaccaatgatctgatggtagcaaggggctcactgataagggtttgaacgatacctttctggggtggacatggctcctgcatttccaattgtctgccccagtaggccgccaaagcgctgctcagtcttgctggaggcctgggtgggtgggagtggtcgggaggagaggggaggggaacacaagatcagaaaagaagagactgggctctgagaggacctctgggcaaggacgggaatgattagaagggacgtttgggagtgcccgctgagctggcacagagcaatttgctgaggagcccagtggtgcctggatggagaagtcacaatgggacacgtccaaaggctgtgcttgtgcttccctcctacaacatggactagctaacaacgcagaaggaagccaccggcggagcagcagtgctcggggatggaaatggtcctggtggcatttgggtctttgtaaagatgcagctatccccgagcttccagctacatccctgtacttcccacagctagttcttcaactcacccaacaaaccaaatacattccttttggcttaaccttgattgagtgcttctgtcacttacaatcaaaagaattctgactcaaatccactcatctgcataatacactcccctgggtgtcccaggtgaaatgcataactgcccttcttttttttttttttttttgagacagagtctcactctgtcacccaggctggcgcaatcttggctcactgcaacctctgcctccctggttcaagcgattctcctgcctcagcctcccgagtacctgggactaaaggtatgagcaaccatgcctggctaatttttgtatttttagtggagatagggttttgccatgttggccaggctggtcttgaactcccgacctcaagtgatccacctgccttggcctcccgaagtgctgggattacaggcatgagccaccacgccctgccaagtccacgctttttaaccactgtggacagtcctgcccacggcacttcacaggcccagaagatgaaaaagcccacatcccttcattcctcctgaccagcctcttctgctctgacttgcaaggaactcaagctgttctgcattccagggccaggagaggaccaggacaaggcgagagcattcctgggcattgctttctttgcatttcatgagatgctgtgagctcttcagagggagtgataggctggtttccggatggcacacctgtggccacacattcgtggtcctgctttgatgagtggctgcctctgaaagtgcagggcagggagagagatgcagacagcaggtgcaggttctgctccaagcaccaccttctccctgaaggaggaaggctcctgggactaagtcattgattttttttctaataaataaaaatctaaagtaaaccaaaatcttcacaggtatcctgtgttctgttctcagagatgaaaagatttgaagcatgctctctctctctcacacacacacacatacacacacacacatacacacacacacacaccccttccccagcctcctctcctgctggcctcctcttctctctgaagcttgtttgcgaagctcagcctagcaagtctgtcttctggagcgtcaagactcggtatcagtggcaacatcaaagaaatgtgttcttttcatatgcttgtctgcttgtgtctaaatccagagtaatgattttctcctaaatgaatagctcttcgctgctttccctcgcccgtataaagtggagcagcgagcagtttgctagtactggatcagaccacaccccgtgacaactcagcatattgtctgttcatcttagaagaaacccttctttgctttcatgtgaatttgcgtctgaacgatttgctgatgccatgtgacatatcatgacaggggaagaataacaaagcttattagtggggttggtaggaggagcatggggttgtgcgagctctatttcttcttccacaaatatctcctgagcagctactgtgtgcctagcattctgagtgcatgaaattgcatcctagcgagatgtgcgtccctctccctgaatgggagcaaagaccatgcacctaatgcagtgcttggcataaactaaatctctgtcacataaaagggtctttggtattattatgtggtggattgcataaagcaccaggatattttgcagctcctcccagtaagagatgaagtcatcgatttcaccaccctttgaatctgggctgggcttgtcttgcattggccaatggaataccatgaaactgacatgtgattgctaatcataagtgtcaagaggccctgcaccttcccttcttgctgctctgggaaccctgagccatcatgtgaaggagtccagaccagcctgctgggtgacggtgatgagagacacatgttacccccagcatcacagccagcagccagctgacttccagaggcagcaccaccgagctgactggcagctgaatacagacacatgggtgagcccagccaagatcggctaagtctggctcagaccagaagaaccacttagatgagcccagtctaaactgccaactcacaaaactgtgggctaaagaaatcatcattgatttttaatctttaataatgttttttgcccagtttttcagttaatacggtgatacatattttatataatgttttgaaaatacatactactactcttaacattcagtattctttgttttatgcatacaaagatatctactatgtatagattctgatgtgataggaaaaaaacaacaaattcctttttcctttgtattctgagatattggaaaaaccaaagtggtttttctactctctacttgatatggtttggctttgtccccacccaaatctcatcatgaattgtaactcctgcaattcctaggtgctgtggaaggaacctggtgggaggtgattgaattatggggcgggtctttcctgcgctgttctcgtaatagtgaatgagtctcatgagatctgatggttttaaaaatgtgagtttccctgcacaagctgtctctctctctttgcctgctgccatctatgtaagacatgacttgcccctccttgcctttcaccatgactatgaggcctctccagccatgtggaactgtaagtccattaaacctctttttcttctcagtcttgggtatgtctttatcagcagcatgaaaacggactaatacactactcaacacaacacttccaacacctgctatgttggggttgtttctccacataccaagcaattctccagcagactctagctgagtgtcctcttattatattcaactctgaccatgtctacctggagatagtgtatgatcccctaggttgaggactcagtcccacaagactaccccccgcctcagatgccagtcgcaaatagtaggttgtcacctatacttctgaccaacctgctgtaagttggagttcccaagaccccctcttgggttcaatcaactttctagagtggctcacagaactcagggaaacactttaccacccatttgtgataaaaaaaaaaaaaaaaaattacaaaggatacaaacgaatggccagatggaagagatgcacagggcaagctgtaggggcgaggagtgcagaacctctatgccttctctgggcatgccaccctccaagaacctccattgtgtttagctatctggaggctctcttaaccctttcctttgggatttttattgaggcttcattacataggcacgattgattacattattgaccaatggtgatcaacttaaccttcagttcctctccctcccaagaggttgggggatggggctaaaagttccaacctcctaatcatactttagtcttcccagtaaccaacccccatcctgaagctacctagggaacctcctggccaccagtcattcgttatcatacaaaggatatttttatcactctggagactccaaaggtttttggagctgtatgacagggaatgaggaggaagaccaaatattttttttacaatattgcatagatattcatgtacaacattgcacaatattgcatagagagtaataataacctccagtaggttcttagttgcaaaggacccctgttacaaaggatagattaacaagagaaaaacaagcagaaatttattaacatgtatatttcatatatgcatgggagacaaccagagaatgagtagttctcaaagaggtggctttgaattctaacttctatggcatcttcaacaaagaacaataaatctttttattattattatactttaagttctgggatacatgtgcagaacgtgcaggtttgttgcataggtatacacgtgccatggtggtttgctgcacctatcaacccatcatctacattaggtatttctcctaatgctatccttcccccagcccctgactccccaacaggccctggtgtgtgatgttcccctccctgtgtccatgtgttctcattgttcaattcccactcatgagtgagaacatgcggtgtttggttttctgttcctgtgtttgctgagaattatggtttccaacttcatccatgtccctccaaaggacatgaactcatcctttatatggctgcatagtattccatggtgtatatgtgtcacattttctttattcagtctatcattgatgggcatttgggttggttccaagtctttgctcttgtgaacagtgctgcaataaacatacatgtgcatgtgtctttatagtagaatgatttataatcctttgggcgtatacccagtaatgggattgctgggtcaaatggtatttctggctctagatccttgaggaatcaccacactgtcttccacaatggttgaactaatttacactcccaccaacagtgtaaaagcatcccaattcctccacttcgtctccagcatctgttgtttcctgactttttaatgatcaccattctaactggcatgaaatgatatctcactgtggttttgatttgcatttctctaatgaccagtgatcacaagctttttttcatatgtttgttggccacatgaatgtcttcttttgagaaatgtctgttcctacccttcccccactttttgatggggttgtttgcttttttcttgtaaatttgtttaagttctttgtagaatctggatattagccctttttcagatggatagattgcaaacattttctcccgttctgtaggttgcctggtagtgtaaatctttagagaagtgacaaaacaaaggaaaaggactttgagtctctatgggaagcaatttgagggggtggagagacaagcaaatggcagataaaagctagtttgtaaagcttgttaatataaattcctgtggtgtcatctaaagctgtcttccatgattaacctttgttctgtctggtagagagggaggcaggatacttgtctttgcaaatctatgtcctgctttcaggcaatagagggaggatggaacactgtcctgtatttgattcttcttaactgccttcaattcaacaatctttcatattttgggaggtatattctagtctcccatattcattaaactaaacaaaaagggaataggatcacactctacagactaaattgtattctactttttttaacttaaagaattgtgaacacttttgttgcaatgaagtactatcttatagtattttttttagccatatgtattttatttcattgttgttcattgaaataaccccttatggatggacattgacaccgtttttatattttgctattttaaataagattgtgatgactatacttacaaaaatatcttaagatctacctctgattatttccttacgacaaattattttgaaatggaagtgctggattaaagaaaagttccgttttcaaggcctcagatcatgttgtcatattgctgtacagaggcagttctcaaaccttttggtctcagtgcttttttacactcttaaaaaatactgaagatcccaaagagcctgtgtttatgttagttacttctatcaatatgtggctgcgttttagggagcacagagaggcaaaagggatggtgtgggtactagctattttagaaattaaagcatagagattttaagaatattaattcacttaaaataatgacgataaactccttaaatgctaacataaattaaggtaacatgttatttacaaaacaaaaaatatttagcgtgaagaatggcatggatttacatttttgcaaatctcatcaaaatctagcttaatgaaagatgctggattgtcctatctgcttctgcatcaatatgttgcaaaatgacacatcatagagcctgtggaaagctccattgtctaccatggagagaatgagagtagaaaaagaaaaaaacatcttagtactattatgaaaatagtttgatcacctgcagatcttcaaagggcctcaggaagccctaggggtccagggaacattacctttaaaaaacaaatttaaaaatctttactaatttgttaagcaaaaagtaaaatctcttagttgctattttctaaatatctttttgaggcctaaattacataccataaagtttacccatttaaagtgtataaatcatcattgcttttagacactaagtttttggattgttacacagccaaagctaactgatataaattacgtattaacattgacagtgaaagagaagcattgaataaatagcatgaaaaagcataagatgaatagcttctgtacagttacaacagttaaatcaatatgtgacattattattgctattgttactattagtaacagtcaaatatttactgagttcctgctgtaagcatttattattctctatctcattcagatttctccataaccaccctgtgaaagatgatttattagctcaatttctgtcctcacagatttaaagaaactattatcgtccatcacagtggtgctatgttgataccatccctgctcccaaagagtgagtgagatgtacaaatgtgaaacatcaaaagaatgccatccatttattctttcatttatttattttctagatgtttgttgaggatccaaattgcaccaggctctgtgctagactctgggggagacagagactaaggatgaatttccccccacttactcctaccttcagggactatgacggtgttgagatacatctcagattagttcattaatgctgactcacgtcataacactcattccaagatgagtgaggtcgggggcgaccgtggacagtctcacactggaggtaggactaagtgcagttgggctgtgggaggagagtcggtgttttagggagcacagagaagcaaaggcaatgagtgtggatatcagagagaagaatcccgagggctgagggctgatattaaggcagagggagatcacactgccaggaaagctagggctaattggataatccaggaactaaaggcttcaatggaatagtccagagacagcaaaaatgaggtacacctgctgctacatctttgttctgaatggcagacatcattaatcaaccacctcctacagagcctgggtctttttcaacccagtgatccaggaagccaccacaaagcaatcagagtgtgcatacatgatgaaccctatttgccattgttgaaatagtcattctctctcctgcggacaaaagacaaaaatattcagtaggctccagataaggtgaatcatagggtaaaatagagaactctggagctagatttcctgaggttggaacctggtttatctacataccaactgtaggaccttgtgcaagatatgtgatctctctgttcctcagtttccatgtctgaaaaataggaataataggattgctaagaggcatgtatgagataataccttctaaacatagcaatgcccagcacatcactatttcattccagcgctcctactcttcacttcttaatctttccccattgcagcaatcaaccaacctccaattggattgaaacaagaaaatagacttagcaaaggtgggtaaagcatgtgaatgttacagttttgctgtgtagacaaggacagagcccacaacttcaaacagcctctggggagaaaagtcattaccaatcatgccaatccctagctgagcaccctagagacatgcctagcaaaaagtgaggtgtcctatctctagatttggaggacagcacattgatgtgttcctttcctctatgatttttagaaacgctcatgattactcagttccactgactatgttatctgtttggttaatttgatgtcctaacattgggaggacaacactagaaatgaagcaccaaggggagaagaaaatcaatctcacaagtaaagcctctgtgatttccagatttcataatagggagccagggaggatccaaatatatttgcataaattccccattgtatacagaactccttcccatcaataagaaaatagtctataagccagtagaaaactaagcaaagactacgatcagggagatcactggaaaagaaatattaatagctttgaaataaatgaaaagatgttaactatcttgagataccatattttacctacaagatgggcaaggttgttataatttgataatactcagtgttggaaggtgggagaggagacaggtgctctcatacattgacgatggaggcattaaatagtagaacctcatgtagatcaatttgacaatatcaatcacaattacaaatcccataacagaattgtacacatgtgaaatgacacatatgtgagattattattgtggtgtaatttgtgttaaagttgagaaacaaccaatcaatagggacttgttaaataaattatgatacagctgcgtaatggaaaaatatataggtataaaagaggaataagaaagatcttatatacagaaatgggattatctccaagatatgttgataagactgttaaaagcaagatataggatataatttatagtatgttgttatttttgtaaaaaaggaggagaaaaaatatatttgcttgtttttagagactcactcctcactctctgaaaagatacctgtaaattgagcaactgtggctggtctagagaggacaattgggtggctgggaccaggagaaggaagaggacttcccatctatacatgcttgtacctttcaactgtccaccatgagaacatatttaccaattcagtaattaaaataagaccaggtgcggtggtgcacgcctgtaatctcagcactttgggaggctgaggcaggtggatgacttcaggtgaggagatcagcctggccaacaccgggaaaccccatctctattaaaaatacaaaaattagccgggagtggtggcacacacctgtagtccccgctacttgagaggctgaggcaggagaattgcttgaacctgggaggcagaggttgcagtgagccgatcacaccactgcactccagcctgggcaacagagtgagttcctatctcaaataaataaataaaatataaagataaaaaaacaaaattatttgaggatgagtaactggcttctaatttgctttatattccttaatttctgtttcatattcatagtcttgtgggatgctggggtctttaccttgctacgttatagagcaaagtcagtttcgagtcccttctctcttgacagttgcgtgtcaggagggagagggggatgtgatacctgccttgccaggcttaggcttttaaaaaccaaagccagaaagatcctttctgttttcctctttatgttctgtcctgttgcatctcttccctaagacaatgtgcaagagtctaggtgcctctgttggcaggaaagcggggaggaaaaaacaagaaaaaaaaaactaagataaattttatagtttacatgatgacctccaatgaatcctgcctctctgaagtcacagccttgtgtgaaccctcatgccgaatctgggctgatttcaatttgctaggaccaattgaaggcagtagaagtgatggaggtaagtgagcccccaaattaagtcttagcctggcaggattcttggttacacccaggaaacaattaaagggcaagctggtggtgttagacagcagcctgtattgaagcagcagagcacggcagcagcagatgtccaggctccttgcagagccggactaccccatgagcactgtgcctagagtagcagttcaggacagttctgtagccatatttatacctacttttaattacatgcaaattaaggggcatgttatgcagaaatttccagaaaaggatggtaacttccccatcattgggtcattgccatggaaaggggtgggtaacttcctagcgttgccatggcaatggtaaactgacatggcactggtatccatgtcctatggagaggaatttgatatggctggacttgtgtctccacccaactctcatctcaatttgtaattcccataatccctacatgtctcgagagggacctggtgggaggtgactggatcatgcgggcggttcccccatgctgttctcatgatagtgagtgagttctcacgagatttgatggttttgtaagtgtttgacagttccttcttctctctgtcacctgccaccatgtaagacgtgcctgcttccctttctgctatgattgtaagtttcccgaggcctcctcagccatgcagaacgatgagtccgttaagcctcttttctttataaattacccagtctcaggcagttctttataacagtgtgagaatgaactaatacagtgcttttgcctcttccctgtttcagccagtcttcagtctggtctggagaccaagccctgcctctggggttgagtcccacctcctacctcagaagtgacctacagaacttgtgcaagttataggagttgctttctaacttccatttttccctctgttgttaccgggagctgccttgtagagtccaagcagacaccataggaagagaaaggccccagggactaaaagatcaagaggagagagaggaaggagggagcagatccagccagcccccagctgttcaagccatctcagctgaagagccagtgtcaaccaacaccctgtgaagcagagttgacctagctctgtcaagtcctgtccaattgctgaattatgagcaaagaaatgagtgctgttttaagctaccaaattcaggggtgaattttatacaggaatagaaaatggattctggagaacacatcaacaatgttatcttgccatacaaacattatttcatttaatcctcacagcaactgtcaaagtaggcattattgtcctcatcctgcagatgaggaaactagattctgggagcttaaattacatagctagggtcacacagcttgtgtgtgctcaagctgggattcgaactcagggttgtcaaactctaaaggctttgctttcagccccactgtccagcactgcagctttgaggtctgtgtgcagacaagcaatgcatgtttgtctctgttcctatgtgacaccaaattcagaatccacctggcagaaaactaaatagcattggccctggatcttagtgagatgtgaaggccagcaccatggtctgagacactttctccaaattagtgatttgaagtggtgagatctctcaaaaacacagctttccaagcttttgaaaatgactaggaaacatgtgctgaaaggtaaagaaagctgggtaacagacctataaatcagtgctgtggaatagccactctatcttcatttaaaaacctagtcttagggctgggcacagtggctcatgcctgtaatccagcacattgggaggtgcaggtgggaggactgctttagcccaggagttcgagactagcctgggcaacactgtgagaccctgtctctaccaaaaaaattaaaaattagctgggcatggtggtgtgtgcctgagctactcagaggaacccttgagcctgggaggtggaggctgcagtgagccatgatcacaccactgcactccagccccagtgatagattgagaccctgtctcaaaaaatcacatcaaattaaaacctagtcttagaccaccagaccctatttggaatgatggaatcttcaagttgggtggtgcatttatcacggttcttaggtgcaagcaccaggacccaccctagctggtctcagctgaaatggaatttttttaagggctagtacgcaaatcacagattgtgtaggaggtcagggaatcaggcttggaggaggcagcacgttccaccagtagctcccagtagagaggctcctgctgccaacacagacacctcagcccccaccacaggtatgccctgcatgggtgttaccaccaggattccaccactgctgtccctccccactaaaggacaaggcacaagcagtgcctctctgttgcctaatactgccctgcccatgggaggctcatgcctgtgcatctgattggtggtgtccaggtcacatgacagtaccacagcagcaaaggaggctgggaaagtgagttctggtttctacctgggggcaaaggacggaaattcataatgtgggaagctctccaaacataggaggggccatctccaagacgacaaacagaaggaatcctagagaccacactttccctgacattttcaattaacagatgaggaaactgaggctcagagaggggaagggttttgcccagcgtcacacagagagtgaaaggttatgaccagaattctagtgatagccacaatcttcagcttggccagcttttgggccagtgtctgttggttatacatgatgttttcattcattctttcagcaagtatttcatgctgtgccagacacagtgctaagactgggacacaatatcaaatgtgacttcactcctaccttcaggaaacttacagtgtggtagggaagaccccaggtaagtgagccagctagcgccatgtgctaaaagacactcttcccggggttggggggcgggcgcggtggctcacgcctgtaatctcagcactttgggaggccgaggtgggtggatcatgaggtcaggagatcgagaccatcctggctaacacggtgaaaccctgtctcgactaaaaatacaaaaaattagctgggcgtggtggcgggcgcctgtagtcctagctactcgggaggctgaggcgggagaacagcatgaactcaggaggcggagcttgcagtgagccgaggtcgcgccactgcactccagcctgggcgacagagcgagactccgtctcaaaaaaaagacactgttcccactacctgaccgtgtccataatcactgatacacagctcaatgcccactcctccaggaagccttccttcaccagctcaccctgcagccacagctccataccattcatcctttcttcaactaacatttacggagcacccaggatgctcggtcatgagacaaacctagaaagcactgagatgcttaacctatttacaggtgttatggcggcttattaagaggctaatggggcactggagggagggctgcttgccaaccctgaggttcccaaaaactatcccagaggaagtgctgcttaagttgacatttgagagatggataggtgttttcaaggcagtcgaggtggggaagagtgttccaggcagtgaaaacagtgctagcaaggacatggaggtggggaatggcctttttaatttaatttaatttaatttaatttaatttaatttaatttaatttaatttaatttaattttttgagacaggctctatagctctgtcacccaggctggagtgcagtgccacgatcatggctcactgcagcctttttctgttgggctcaagcaatcttcccacctcagtctctccagtagctgggactacaggcacacaccatcatgcccagctaattttttaaaaattttttgtagagtcacagtttcaccatgttgcccagcctggtgtcaaactcctgggctcaagcaatctgcccaccttggcctctcaaagtgctgggattacaggcgtgagccaccacacccagcgggaatggcctttaattccacccctgtctcatgacccttcacagacaccatcctgggctgtgggcatctttttccagaatgctggagtgcaagaccccattcttactcttgtccgtatttctcaggctcctgcactgaaataatgtctgggattcttgtgtgctcccctagtcaccctcctggactttgagcctcatgggagatgatttaaacctctcagtgagaggcattttcctttacatgtgaaacatgtcatcacattcccgtaaccccaattgctcttgggtgaaaataaatagataaataagtaatttttcacaaaattaattagcagataagaagatgctaatgtgttttgccaactgtatctctccccaggttgctcccagccagcctggggttggggaggggctctgcctgcttggagctggcaccttcagagatggcaggcaatcctgagtacagtggtatggggacttctctctacctgcgggccaagtggactaccctttcccaatgaatgaatgtttgtgttagtggaaaggcctgtgacgggacagagcccaggttctagatccagacagatctgggctggatttctgcatggctgtttagcagccataaggactgccttaacatcacttttctcaactgcaaaatgaagtttgctgaagatgcctgtcttccagggtagtttcgaggattcaatgagacggtgtatggaaagctctggaaccaggtgtatgatctccatcttacagatgagagccctcaggctcacagaggcaggtaaggtgacctgcctaaggtcacactgcccgtgagctaggatctgcatggtccatcctcatgatctcacactgtgctagccttctgcttggcaaagaccagaatattccttgaaacagctgtgggtctcaggtcctatgacagcaggcagcacagggaaagccaattccctccctccagggcagacctggctgtcctgtgccaagggagctttgattatagtgaccttattttccaaccaacgctgggacaatgggacccacctttgacatcaggaggctcccaggagacccttggtgaggggcaacctccacggctggcggggggggggggggctggtgggcagaggctggcatcaggtgagccttccaccagagggctgcctctcttccctccccactggtgttttattagctggctggacaagtggcttctaggatggtgaagcaggctcttaaaaatttcccttgaaaattggcagatttgtctcttcagtacctgctatagagctgaggcaggaagggcctgacatcccgtttacattgacaacaacaaatggtgtcagcaccatgctgaccactgacactgatgacattccttatctcagcaatcttaggaggcaggtcctggatcagttcccatatttggatgaggaaatgggagcccagagaggtgaaagaccttgcccagggtcacacagctcatgggtagcacagctgggattcaaactcaggaggctgtgactgcaaagtggatgttcccgctgcagcaacaggcagccttcccaaggatcacttctcaattgtaggatgagtgggcaaaagagccagtgatcctgcacttctgggcaggtaagaaatgacatctggccgggcgcggtggctcacgcctgtaatcccagcactttgggaggccgaggtgggcggatcacgaggtcaggagatcgagaccatcccggctaaaacggtgaaaccccgtctctactaaaaatacaaaaaattagccgggcgtagtggcgggcgcctgtagtcccagctacttgggaggctgaggcaggagaatggcgtgaacccgggaggcggagcttgcagtgagccgagatcccgccactgcactccagcctgggcgacagagcgagactccgtctcaaaaaaaaaaaaaaaaaaaaaaagaaatgacatctgtgcaagattagtcatggcaagtctgtttttggaacaccgaagtctgttctcatgctgctaataaaaacataccccagactgggtaattataaagaaaaagaggtttaatgaactcacagttccacatggctgaggaggcctcacaatcatggtggaaggtgaaggaggagcaaaggcacatcttacatggtggcaggcagagagagggagcatgtgcaggggaactcccctttataaaaccatcagaactcgtgagacttattcactatcatgaaaacagcatgggaaaaatccacccccatgattcaattaccccccaccaggtccctcccatgacacgtgggagttattacaattcaaggcgagatttgggtaggaatacagccaaaccgtatcacaaagtaatctagatgtccatccaaaagggaagggttaaatcaattacagtttactcagaccatagaattgtatgtacatttaaacataaccaggatgctctctgtgtattgaaaaggaaggatttataggatttattgttaagcaaaaaaaaaaaagcatatggcagaatagtatattaatatactattttatatgtaaattagaggaagaccatcatctctatttgcattaacttgtatatgcaaaaataaattctggaaggatacataagaaactgaagtgttttcttggagtgtccattggggcaggaatgagccagagggtacgatgaggaagcaggggagattgtcactcttcacctttctacagtttttctcaccttttttttttttttttttgagagatggggtctcactgtgtcactcaagctggagcatactgctgccacatagctcactttggcctcaaactcctgggctccaagcaatctcccacctcagcctcctaagtagctagggctataggcatgtgccaccatgcccagctaattttgtttttattttttgagagacagagttttgctgcattgctcaggctggtcttaaactcttggccctgagcgatccttctgcctcagcctcccaactatcaggaattataggcatgatccaccacacctagtacctttttattttgaaataattatagactcacaagaggttatgtagcaaaaatagtacagagagttcccatgtaccctttatccagcttccccacacggtaacatcttctgtaatggtcatacattatcaaaaccaggagattgcactttttttccctcccatgatatttttttacactttaaaataatgtggtaaaatacacataacataaagttcaccatcttaaccactgttaggtatacagttctgtggcactaagtacatttacattgtttcaaaaccatcaccaccatccgtctccagaaattctcttcatcctgtaaaattgaaactctatacccacaaatgataactgcccattctctcaccccagtccctggcaaccaccattctacttttgtctctatgaatttgactattctgtcacataagtggaatcacacaatagttatccttttgcatttggcttatttcacttagcataatgtcctcaagggtcatccatgttgagccacgtgtcaggatttcatgcattttttagagcagattaatattccattgtatgtgtgtgccaccgtgatatggtttagctgtgtccccacccaaatctcatcttgaattgtagttcccataatccccacatgtcatggaagggacccagtgagcagtaatttaatcatggggcaattaccttcatgctgttgtcatcctaatgagtgagtgctcacgagatctgatggttttacaaggggcttttccccctttgctcaacacttctccttgctgctgccatgtgaagaagtacgtgtttggtcccccttccaccatgattgtaagtttcctgaggcctccccagccctgagtaactgtcagccaattaaacctctttcctttataagttatctagtttcgggtatgtatttattagcactgtaagaacggactaatacacacagtttgttcatccgtttattcatcagtggacacttgggttgcttccacctgttggctatcatgaataatgctgctatgaacatgggcatacatacatggaataatccccatgaacctacgtgttcaagtccttccttttaaatctcttgggtgtatacccagaagcgagattgctggatcacatggtcattctatgtttcattttttaaggaactgccatactgttttccttagtggctgcatcattacattcccaccaacagtgcacagggttccgatttctccactttctcaccaaccacgttactgtctgttgatttctatagtagccatcctaatgggtgtgagatggtatctcattgtcacgtctatggttttctcacagacaaatcattcctgctgcattactgagttgcccccagggaaaacacaggaccaaggacatccctgagggacatcaggctcagtggccagctgtggccttctcttccccagtccctgtgaggctcagcttctggaaaggatgttggaggggtggcatgaggacctcactggcgggctgtgggccagtgaggggtcaggactgagggcttttggctgcagaacccagggcactgggggcctttagtgaccactgactttcattaggaagggtcaaccttgcatcacccagactgacccaggtgctcccggcaccaaggcaaggacggacctagcagaaggcaactttctgttaaaagcttcgccctctctccctgtcacctattgattctacttcctaaatatcttgccaatcctcctatttctctccatcttcttgccactgccttagcccaaaccatctccctgtctccttcgagttatgtcaacagcctccagatagcacctccccgcctccagctttgccccatcaatcccaactccacatggtgccccagaatgatccctctcaggtgagaatgtgcttaaaatatgtaaatgactcctactgctcacagcataaaattgtatcaagccctccctaacctggccagccctttgttccctctgtcccaacactgagagcacagcaggtgttcaattgactgttgaattaaacgtcctcacccccccttcctcttgaagtccagtttcagatctttgctgggtttgtcaggtgacctatgctctctgcctggatagttctctctccacctcactcacctgggcctgctaaactgcagggggtcccctaaacatcagcctcaaagtccccctggccccccacaaaggatgctttccttgggctccagatcctctccactgcctgatatggtttgactctgtgtccccagccaaatctcaccttgaattgtaataatccccatgtgtcaagggtgaggctaggtggagataatggaatcatgggggtagtttcccacactgttctcacggtagtgaataagtctcacgagatctgatggttttataaatgggtgttgccctgcacaagcctcttgcctgccgccatgtagacgttactttgctcttccttcatcttctgccatgatagtgagccctccccagccatgtggaactgtgagtccattaaacctctttttctttataaattacccagtctcaggtatgtctttattagcaacatgaaaacagactaatacacttcccctccatgtcgttgcctgtttaaagcctgtctgccctgctcagcactaacagacgcaatacctgccttgtgcactatcatgccccctgttgtcatctctccctagatcttggaggagtgaagagcatgtggggagatgaccggaaagcccttctcccactctcggggagggagaagctcagagcacaagccgcttggctctgcccctctgtcttggaaggcaccgaacaagccatgtacagattagcatggacacttagaaaacagtgaaacgctcctagatgcgaaatcatggggttcattcctctccctgctgacagtgggagcttccttcctgtcccctgcagcagtgcgaggctgccctgctgttcctgagaaagatgacggcttgctctgatgagggctgctggctgctggctgctggggcaaagcggggaggaggctccgctctcactgctagtgaggtggaactagcgggactgggagccccacaggagcccgattcaaggctgaggacactccctctccttctggaaatgccaaagagaagaggagagcacgtcttggcatttgggtgaggcttgcccagctgaagttggcagaaaacagaaagggagtgagcgcggagggcaaggtctccttctttggggtgagggggctgtgagaggcccagctgaggcctccgtagctggatgtgtaggatttggttaggaccaggtggttagtaaggctttgccattgagccttctctgaccagtgagactcaccccagtggcataccctagagtggggacataccctcagctgggggagcacaagttggggggtgaagtgcgcccccagaagggagcatcagggccattgctttggctaagtctcccgaattatctttcaatggctctgagaggtacagctctctgggctcccaggcctggcccttgctggtgacaggcaggaacccttgaccatggtgacgaaggaaaccccgtgacaggcatctgctgcttgaattccttgggtacccaagaggttttcaaggaaccatctccaaaacaaaagtggggaccccgccagacccatagaaaaaaggaagggaagaaatatacaaatgagtctgatcggaacctcgtgtactcgatggagggctgtgggccgaccctgcgcaggacccaggagccctggggttccagtcttctcacttatatttgcccccaggcaaaccgcaggagggagagcaccccttggcgggggggaggtcagctcagatctggaaacagagtgcctgggttcagacatgggtcctgctacttccaatctgtgtgggtctgagaaagttgcccagcaccttcctgactctgagatgggaacgccaaccctcctgttggattgttgacttgcctgggaggctcagtaaaacggctgactcacagagacctcccagtggctgcctgccattacgtccactctccagacttcaatttactcttgggtcttaatttgttcagcaacaggattaaagggttggagcaaatggcccttaagttgccctccagctctggaattagtaaccctgtgtacgtcagttaggttattttggttgcatgcagtagactggcaactgtgtctaagctgcatagaaatagctttgtatgatggaggtgggcagaggagggctcacagaagcagagaaaatgggacagaaacagagaggtggtccaagatcagggtggtgggtaccactgggcaccttctctagggacccagtaccaggagggatccatatctttgcattaacgttggtcagcagagggaagggcgcctgggtcagcagtcccctcgtgctgcacccaggggacaggaggacctccagggggagatgaggtgccattgccctcagaaaggggaatggacgccaccggggcaaagccaaaagaagcccaccaccctaggtggtgtgacaaaggtccagaaacacaactctgattctaccaacagggatgaacacacttaagacaactatgcctagtgccgttgagagctttgaggtgctggctcttcccactgtcactatccatagtctggggctttccttcatcttcaaaaaaaaaatcatctccatcttgaaggattccacttcactgtgagttactcaaaagtcaaggccagcaccagagacggcgtccagcacacagtatgtccaatacatgccaattgaattgggacggtcaggtaattcccctgcaggtgacatttccagaaaagtaatggggtgtgtgaccctgtgcgcactgaggtccatcccctctgttccaggttgtcacagatgctctgacatttgcagggaaggagtggacctgccacatgatccaaagcatgtgcaggagatttgagagatcaggacatccgccatccatcagcctgtggaaggagagtgcaataacattccccagggaaaaatgcatggcaaacaccaggaaagccactttcttgcctcccagaggtgacaaggtttcccctcttgattgatgcagggggcagcagcatcttggagagaagcacaggcaagggagaggagagaagctcggaccaggtctatgtgggatccaatgatttctaagtcaagatgttcagctccgggaaatttacttaactttctgaacctaagcgtcttcctttgaataatggagacacttacaatacctactgcatcaaggttgtcatgagatttgatgagttaataattcatctcaccaatatttgttggacacctaatatgtgttggttgctcttctaggtgcctgagctacataaatgatcaaaatagagacacctgccttcctggagctttcatcacagtgaacacaggcagagctgctaccacaatgtaggtgccctaactattactagagtgtgaatgactttcctttccaagtggcagcagcagcagtgtagttggctaagtgccagaccacttcagttgggatgcattcaccaggtctctttccaaagattccatgtctcctccttctgagcaatgaagttggggtgaacatgtgccttgctttggccaatgcaacatgagcagaaatgacagttgtcctgggtggaaactttaagagctagcacacggcacaccatgattcctccccggagctgcagtactcagggacacgtgggaccagataggtgcctgggtgactgagagccacggagcccccgtgtggaactacagtggacatgtagcctgagtgagaagtagactttcatggtattaaaaccctgagatttgggggttgcttgttattgtcgcataacagagcatctcctggtggataaaactgacctccccaacttgagccttggcagagctttccatggtacaagccttgttgttatatactaacagatcaccagaagcataactgtaggtcactaagcagagagtgcaaatgtaggagccctgtcctgtttcctcactctttgcactaagcacactgggcagtttccacatcttgaatttgctctctgtgtaaacagtggccatcaccccatccccgcctgctccaggatatcagacgactacaggttccagcccaggctggaagcagccggcccgcatccaggatccccctgtcctcccatctactgaagtttccaactgtggatcccttccgaccaggcctcccgtccctgtcaacctcaggaagccaagaagcagtcttccctcttccctctcctgctttcggttcggcttctctgatccagcacaggcctgctgccctctctttctgtctctgtttattgggacctcctgtgaccattatttcaggaaacaaactcctttaaacctccccccacccccagcctcttcaaagacaggtgaagcagttagagtccaaccaggaaaacagaagcccttctgagtatttgaaacagacagaatctaacctagggaattgattacacaggcagtggggtggggtggagagctgagaagccaaactgccatggtaaggcagcccagacatgagcaacagcaggaaggagccatcagctcttgtctggagggacagagggaggagggcctggggttaaccaggggaaggtggaaccggagcaggctggagccacagcctgcaaagagacgcagccactgaagacaggggaggaggggaatgcttgaacttctctcttcctgctgccctccacctcctcccaccagctgaatgatctgggagcgaaggacgcagtgcccaagctttccccatatatcacctgctgccccataaccctcgccggtagaggctgctctttctcccacatcccacttagcccagggcacagggctatgctggcttttcctctgagtttttccatcttggttggtgacactgccaactcaataacccatgcccaatccctttcttccttacttgcctccactctaggtgctggaaaagttaaaaatttaaaaactaattttccaagtctccctgtaactaaggttggccaaagtttttgttttcttgataaaaggtaacagacatgtggctgtgaccacctctctccccttcttcttgtcttgaatgctatgaaaatatccggcgcagcagcagccatcttgcaaccatgaggtaaaaagccagtacattaaggatggtaggagaggccagtgcctgtaatcccagcactttgggaggctgaggcaggcagatcacctgaggtcagaagttcaagaccagcctggccaacatggtgaaaccccatctctactaaaaatacaaaataattagacaggcatggtgcatagtggtgggcatctgtaatcccagctactggggaagctgaggcaggagaatcccttgaacccaggaggcagaggttgcagtgagctgagatcacaccactgcactccagcctgggcgacgagagcaaaactctgcctcaaaaaaaaaaaaaaaaaaaaaaagagtagaagagcagaaaaaataaaaatcctgggtctttaatgacactactgaaatgttaagctagccctaaaaggttcacctccagacttctcaatatgtgaaaataattaaatgcctttattgcttagatatctgttaagtttctcttacagctgcaagcgttcctaaaacaacatcatctatgcagcttcccaagccgggatttcaggggtaaaattcagccccctgtttgctctcacccttcacgtcccatgactcatggagccctggagatttttatctccttggtgtctcccctcctcccctccttgccaccatgactgactacatcataggtcggattctcatgcacccctatccaatcttcccttccgaagcttctccccatgcagccagagggatctttctaagatgcgtacattgcatgttggataatgtttctttttggcttaaaaacttgggccgggcgcatgggcttacacctataattccaacactttgggaggctgaggcggggggatcacttgaggccaggcgttcgagaccagccatggccaacatgccgaaaccccgtctctactaaaaatacaaaaattagccagatgtggtggcggatttctgtaatcccagctacttgagaggcagaggcacaagaattgcttgagcccggaggcggaggatgcagtgagccgagatcgcaccattgcactccagcctgcgcaacagagggagactctgtctcacaaaaacaaacaaacaaaacaaaaacaaaacaaaacaaaatagaataaaacagaacttgtcctggtcccagctccccgctgccttcagaacaaaacctaaactgcttagcttggcagacacagcccttgtgacttagctcaccaaacctcagccattcctcctcttgaacttcccactccagccatgtaagctgctaaccattccctaaagtcgttttctggttacaagcctttgtattctccaccccacactgcctgaatgatctaacggctccccagctctgggaggccttcccagaccccagctcaccccgccctcccctgtaactgcttctttccctgcttgcacccagctctgtagctctttcatttgcttgctttttccttcctcccttatcagaaagtcggttccttgacaacagggccatgagtgttattcatctgtatattcccagtgccggacacgctgcagggacttgataaatgtgtgtggagtaagagggtgaatgagtgagtgagtgaatgaggctgtgccttcgggaagctgtgaagtcagctgcagggaggagctgactttttgtggattttgcagagaggacagaacagcaatgacctgtctttcaaaacctgccgaataacctggctttctggaactttgcccagccagctttagggaggtgaactcctgcccgtgtagagatgtagctatgtcccttctccttaaatgaattttgtctcaagccacctgccaccagggatccacctcaaagcacgattttcccagaaaccttccatttgtcttggaatgtctgaggagaggaggctgagattccagattcgtctctgaaattccttggaggcctcccgttcccttccttgtcagaggggaagatgacttttcccgcagctcggagattgacacacctgtctcagatgggaaaagaagggctacaggggtaagaatcgtgcatcctcttaatgacaacaaggcacatttgtcctgctggtgaataaatgattatcgtgtggatcacacagccctcctgttacacagcagttcagcgccaaagccctctaagtcgtaaaggaagtcatgataaagaattatgagatccggtaaaatgaaaattggaatcaattagttcccttcagacgagagctgctcatagaacattcattatcctcaccctgctgtgtggggggtgggatgggggtggaggggaaacctgttttcctacaagtggccattgtcacccattaaagagcctccaacactgctccctgatttctcctgtgttcatgcgtccccacggggagaagcagaagatgccagatcaaaggggcagttattaactccacgccagtccctgcgatctcagcgccacctgggatcgggctgatagggctattgcactgttggagtgaagtccttctcagctgcagctgtagagtcaatgcaattttaggtttcattcaggaaacagcagttccttagctgatgtattaaatcaattagacgccaacggctgcagaggccaagacagcttcctgggcgagcgcccgttaccaggatcatgaatcacacaagtgtcggtaaggtgctgctcactctattctgagggatgcatccgtgaaagctcaagattggccatggaaatacacatggccggccagttttgagaaccacggggattgggaaggggtctaggaggcaaatggctgctttctgtcttctgcttccttttttagtttagttttcctggaaatttctgcctgataaaaatgcccaaagccatcttcgaataagtgcaaatctctccctaactctccctgcccaccgcctctgcctttgcccaagccagcaccttctcttgcccgaagcctcctctctacagccctctgatctgtgctccatgctggcactggattcatctttctgaaaggaggttcgctctcgttgctttgaaagtccttcaacggcctgccctggctttcaagaaaagatgccacgccattgctccttccagcctccctccagcgggcagctgcacatgccttgcccctggcccaagagctcttctatgcttttctcatcgttttgggagcttctgtaaatatccccttctccaagaagtgtcccctgcctccccagaccagggaaagaaccctgattctctggaatccttcagcccctgcacactcgccatgcagaattgtcacctgtttgcttggaacttccgggaggcagatttaggcctttgactctatctatagctcagcacccagcaaatggcaaatgcttgatcagcgtttgtggcagggctgaatgaaggaacgggcttctggagaaggaaaatttgtattttctgggcctggtagtagagggtgcaggtgagagaggtgtgtgccagatgagacaggagagaaagatcggggaaaggaagagctctgggaaccaggagaaatgccagtcctttcatcctcattttgctgttcaatttgggaaccacgcagtggcatgtgaggaagctctggtggggtgatgatccagctctgaaggaagctaggaaacgctgcttctgaaagtggccacgccaaaccagaagtctctcctcttggctcaagcaatcccaccccaggacttgtttaatgaggactcttgaggaccatggagaagaggttgggacaggccatggccacagagggaagagactggctcaactggcctgagacctgggtttgaatcctgactctgccatgcactacaagttagtgggggaaatggcttaagcccttgtgcctcaggcttcacatctgtaaaatgggaacaaagtgaggttgtcaaggggattaaatgagacaatgtttacagagcatgtaatatagtatctgggggcatgaaataaaatgttagtgccatcatgatcacccaggaaccccccagaactggaaaagaagtggcaaggcaggacctagttagcagagctagaaaggatggtggaggcttgctcatgaggactaggacagaagtaggggggtccttgagctcagtcacaggaggaatgaacttgggctcctacttgaagaccacctgccttgcttggctacaaagccaagaatgtgtgtgtttgaaggggagggtcccttggcttgggctgaggacaggaggtttagctgagtgtctggacttgacttcgaccttccaaagcccagattctggtcctctactgatctcccacctgctcagtcagcccaacttgcccaaccagctgtcatgcaggtccagacatgaagccacagccatcccgagggctcagccgagcccccaggcagcaccaagagacctgacttgttgttcctgctgccctccaccacaccatgcggcagcccaggcctcagcccaccagggaagggctctctgcccagggtggcccccagcttgtggtgggggggtcaagtgccatgcaaagccagctgcagcctggcagggcccaatgcagcccctgattccacagggatggcgttttcagcaagctcgtgaaattaattaaattcttctcttcattctgactctgtaatttatcacagcatatgtccctgcttttttatattagaaaataatggaaattattccttaaataatcaatttttacagcttacatttaatttatgaaagaatgacaggcctagcgccctgcctgtgaccacaacttcgtcctccatctgcctctttccctgggtgtccttgcccaggagcaagagaaaagcacaagggaggcgaggggaagagggccagtccgtgggtcctaccgatttctctgcagcaggtccagcaatacctaagcaatccagacttggatgaggaagagtggaggggaaggtctgggggtgctgctcaccatgctgtcccctgggcaggttgctccctctcagcccagggccccacaagcctttattttgatccacatggctctatttttgacacgctctgcttctggctgacttctgtggtcaggctgatcaaaacctgtcagttctgcactcaaaaccctccagatgatcccctgtagctctcagggtgagattccagctgcccagttcagctgttgggccggccggctcttgttgcagccgctgcatttccagcccctctgaccctaccagtggccctactgtctgggatggctttccccaggccctctttcacgggacaacccttcaagtccattcttcaaaagtcggctctgggaagccttccccaagcacagccctctgcccccaccacagccgcccagatcaccccacacctgctttccacacctcagctgctgatttgccaactgccctctctcggcactgagggcctggtgagggtgggaaccacgtctcatttgactttgacctcccataacctggtgcaggacctggcacttagaggataaatcagtgccccggggccaccacaaatgaccacaaacgttgtggcttacaacacacatctaacaggggtagaatcaggagtgcaagtctggctgggctaaaatccagcctggcagggatgtgttccttcctgggggctctcaggaaactctgtttccttgctctttccagcttttagaggctgcctgcatgccacagttcatggcatcttccatcttcagagccagccacggtggggtgcgtgcttcccacatggtatcactctgacctcctcttctgcctcttccttccacttttaaaggccccttccgattccatttaggccaaaccaggataatcttattccaaagtcagctgatttgctaccttcattccccctgcaacctcaattcccctttatcactcaacataacatatccacaggttccagggataaggaagggggaagccttggggggccattattctgtccaccacagtaagaattcaatccttcatgttgagcaaagatgaatgaatgagatgaacctacaaacttcatggaccaccaattctttgcacctttttgcctctatcgtaagtggttactgaactgcctaaaagtgcttctttggaatcacacactggaaatcatctgttcagagaaaacccgccgaggctgggctgcctcctcaccgtgaccaccgcacttcacgaaaaatctatccaggccgtggtgtctgcacacgacccaccctggcccagacccagggtcctgtgtctgcccttctcccccataagtgggttgcctttcttcacgaaccccaaacatgcaatggagaatcacccctgcgagttcactccccactctggtaccttcagtgaactctcctggcacaagtgggtggatgccactctagaaaaccatatataggtaaaaatctgaatttgcaaggagggtctgttagaagtcgattactcattacagaaggatacaccacgcggtctctctaaagtgcaggcttccaggagcacttcaacacaggagctggtgtacgactttgagagtgacaagaggcattgtctggcaggcgtcacatactccaccacccacaggagccagccaggaagacaacggaaatgatgaatcaagcccagtaagagagtccattgccagatcgaggcaagcatgcacaacgtcattttatgctggtaacgtgacacggttcacaatattgtcccataattctatttggacagctccttctcttaagcctagatcagagttagctagcatccccctcctcccctcctctttctgtgtttttattctgggggagaactagagctggttgctacagcaaccaatttatttctgcaagtgcattttaacttccctcagatgttctatttgatgggaacttttcccttcttggggtctgacttttgcagcatgctttcactaagcctgcaaacccttccttttctgctgccttagggttaatacacacatttacttaacacaggggggaaaaaaaaacacaaaacacccaactttaaaaacaaggcatttggaagagagagaaaaacaaagtaattacatttccaactctgctgtcatatcaaacttgtaggatctcgggagctgcggcgtttaccatacaagtgttggttcttctttactcctctcctcaccatatagctcagaaaatatattcatttactttttcactcaacgaataatttattgagcatttctgtatgccaggccctatgcgttaggtggtggagtttcagaattgaacaaaacagacctgggtccctcctggagtttgccaggtatgagaaagacaggctgacatgcaaagacacactgacatgcaaatcctgatgttgattatgggggtgagagctatgaagagaggagcacgccatccagactactggtctggaacagcctctctgagaaggtgatgtttcagctgagattgaacttgagactgaacttgaacttgaaaccaagaattgagacctgagagaaagaagaactctctctgagctggaaaggagcttggtagattggagggagggacagtggccagtgtggcagcctctcagggaaaagggaacctgagctcaaggtgcagttgcaggtaaggaccagatcacataggacaggccaggtgtgggcattcatattgaccctcagtgcacgggaagactctctgacatggttttcagcagacaagtgaagtaattgacatttgcacagatcctctggctgccaaggagagaacgcattgagggaatgtaggtggcaattgtgaaggagaaggacagtgtcgctggaggagggttttccaggcatccagaggagagaagcaggtggcctggccaggaggcggcagcaagacagggaacagtggacagggtagaaatgcatcttggacataacactggcaggatctggtgatgagttgcctgtggtctgtggcctgagccacaggccaatggtggtgctgtactgagatggagaagctggagaaggagtaggtttggaaggaggaaatagactccatggcacctgcctcctgctcagaagccttgtcatgcaattcctctttatgcaattccccttttgagtctgtctccctctctgaatgggaggttccatgaaggctggggtcacacctacacagttcactgctgtattttttttttttttttttttgaaacagggccttgctccatcacccaggctggagtgcagtggtgcaatctcagcttactgcagcctggaactcctgggctcaagccatcctttcacctcggccacccaaagtgctgggactacaggcatgagccacagtgcccagcccacagctccattctgagtagtgctcacagtgcctggcaccggaaggccctcggatagccactgtattcatttcctagggttgcagtaactaattaccggatggcttaaaaaaaaaaaaagaaacatattttctcacagttctggaagtcagaaggctgaaatccaggtgcagatagggttggttccttgaggaagctctaggaaaaacctgttccgcgactctccctcagtttgggggctgttggtagtctgcggtgctcctgggcttgctggcaccttgctccaatctctgctttctcctctgtgtgtcttttccccttctctcctaaggacacttgtcattggacctagggcctaccctaattgaggatgatctcatctcaagatctttaacttggttacagctgcaaaaacgctttttccaaataaggccacatttgcaggctctgggcattaggactcaggcatactttttgggtggtcacaattcaacccacttcatccaccaactgagaaaatgaatgagtgagtacccggcgatttctggttgattggagaaccaagtgtaactcaaacgctgggtcagagaacaaagccctggcttttcaaccagccttctgtggtagctgtttgtattcaccgccagtttctctaagttggtcatttagggatgcgtccataacacagcatgtcaggtaggtgactcacagtgaataaactgaagagaagctgagtcatagttaaaagcggacttaacattccaaaggtgaacagcaatccagcctcgaggctgaagccattcttatgcctctgccagccaaggcagagacagataaataaataccatcactgagccaggcggcacagcgcgacctccaggcccgcacccctctcaggcatcctgcctggccggtctacctccttccagaagcaatgaatatttccagcatggagcaggaggcaggtcaacaaatgctgctctaaacatcttggtcaagcttgctatgacctcccatcctgccatacacaccttaggtcacaggcagcctcctctccacactgccaccctgcaatgagggccaccccctctggaaactacagggggtcaaaaagtgggaggtttgtctgtgtgccccacaatccaggcagagaggtccagggcagaggggacctttgaggggtacatggcacccttcgaaggcctcagaacacgtctgcctttacaagctgaccacagccaccaacacttagtcttaggaacccgacttctctctacctatgaaggttttctgcaaggttttgtctcctagagaccctgccccatcccaggccctgcccggctgaccatccccccctccagtatgaagagtctgcctgtcctgatccaagacaggcaaggaccagaccctggaggaaggcaagtgacattgcagggggacaagcagaaaagtgtctgaggagcccaaaggccaggctctcctgggactgagagcagcagctccggctccaggaacacacagggatgcacatggcaggaactggggctgtcacgagcaaggccaagtgctctccctgggtgctgagtttctttgatcaccagacctgagaagggcccttttccacaggggccttgggactcctgactgctgcctcagcatgaaagtgtcctgtctccccagctgagcccctctctgggaggcaggtccccatcccctgggccttcctgctggggtgtgctgctctccccacattgtgtgggcaccagcactatccacttagcacctcaaccccccggggcctcttcactcgtctcccaggggctcccctaaaagctacttgctcctgagctccaattgtaatcaagtcccaaagcagctgggtttaaagacacaattatgcattatggataaagggcaggtcaccctcccccgccagccagctgggcatctgtgcttgccccacggctcccatcagaggctccagcaggcctgtccctcccctgggcacacagagcaagccaaggcgccccttggtgcccgcagtcccaggagccgagcacggggctcctggctgcagccgcagaaaggccctcttgctgggatcccactacaaattgatgaacgctaatgacctgcttcctccatctggtaccacaatcatgaagatgctcccaaacgctgggagttggggggtattctttttttcttttcctttttgcctttttttcaaatatttatgaagagattttccatttatcctgacacgtcttctccaccgtgggtgtcagctaggagggctcagacaacaaactccagaaggtattttccccaaagcagcatctggctccgttggcaagtacagcgggtggtttgctgggaattggccgaggaagagggaggaggagccacaggctggcagcctccggtcctggctctgtgatgctcccagggatggggctggagcatcccaagagagcagccaggatacaggacctcacaggcacccccaccagcctctctctcactctcacccttcaagtcttctggtctgatgccaaagctccccagctccccaggtaaaccacctgggtggtgaccagttctccacggcagcctctaagagtcttcttcagcgacaattcccagtgggacaagttggtaaaggagagggtgctggcttggcccctgcatctcaagctctcccctcccaggaagccttctaaaggcagagccagaggcctccctcattctccctgatgggcatttcccacctttggggacagtgtgacccacaccggggacagagagagttggctgggcagcagggctagaggtagcaataagaaccttatggaatctcccaggtcacaccagcttaactgctgtcttctgtactcactgtggcagagccagccaaatggatccaggaacccccagccccacattccttgatagttaccagagtctgagccaggctgtatctgccaaagatgaattctggtgaaaatcaaacactttccaggagatcttgggtccaaaggcatcatggctttgtgcccttgatcttgcctgggctgcccatcagcaaccactggggagcttcaaaaaatatcaatgcccagccccactccagcatggtcagaatacctgagagtggggcatatatttctaaaatctcccaagtcattgccaagggcatccggggttgaaaactattgagctatgggaagactatgtcccctggacacaggcagtcctagactggagtccttgctctttcacttacttgctgtgacctggaatcagttacttgccttcccaaagcctcagttgcaccatctctaaaatggggataacaacatttttcttgtcctagggtgcccagcacatgtaactgtttaacaaagtcaagctgctattaatcatcttccatcacgaacccatcttccaggacaagagactgctggtgttgagtatgcagagcagcccagcaaggcagccggccaggcagctgcttccagccatgcacagaactgggaccttggaactgttacctcccttacctgcagaacagcctcaaggtctcacctctgggtaccaaggctgcaagagggcaattcagtccttacctctgggtaccaaggctgcaagagggcaattgagtcatgggccataccactccccaggtgatgacactcccaacagatacagcaccagtcaaagaatatctctctgaggccgggtgcggtggctcacacctgtaatcccagcactttgggaggctaaggtgggcagatcacctgaggtcaggaattcgagaccagcctggccaacacggtgaaaccctgtctctactaaaaattcaaaaattaaccgggcatggtggtgcatgcctgtaatcccagctacctgggatgcagaggcaggagaatcacttgaacctgggaggcggaggtttaagtaagctgagattgcgccactgcactccagcctgggtgacagagttagactccgtctcaaaaaaaaaaaagaatatctctccttgaattttattttgtttcattttattttaatttattttatttttgagatggagtctcgctctgtcgcccaggctggagtgcagtgatgcaatctcagctcactgcaagctccgcctcccgggttcacgccattctcctgcctcagcctcccaagtagctggagctacaggcgcctgccaccacgcccggctaattttttgtatttttagtagagacggggtttcactgtgttacccaggatggtctcgatctcctgaccttgtgatccgccctcctcggcctcccgaagtgctgggattacaggcgtgagccaccgcgcccttcctctccttgaatttttaaaggatctagagcatttaaagtatctcctctaggaagccaatgtgtctcccatcctgtttatctggaaatggtctgctatcagattcagctgagagtagagccagatgcgagtgtttgaaaactcactctgcttggcaccgccctgggtgggccagggtggcatggggaagccctgaggcccaccacagtcatgcagggagcaagtgcttctgggcagacaccccagtgatcctgcagaccacttgaagaggcccccaaggccccagaagcattgctcactcatgagtaaattcgatttcttattttgtgttatgtacatctcctggtgacatctgctgatgccagaccatcttgcctgggtcagcagggcaccaatgtcttcttcaaatctcatggcagctctaccaaagcaggtgccactctgccaatggattgctgggatgagtgggcctggaagagttgagttgcttgccatagccctttttgtataccacactttgccgccacttcctggacaagaaaagaatttgaagagagttttggcaactgacagcaacgatttcttttcttttttttttttttgagatggagtttcactcttgttgcccatgctggagtgcaatggtgcgatctccgctcactgcaacctctacctcccaggttcaagcgactctcctgcctcagccacccaagtagctgagactacaggtgcctgccaccacgctgggctattttttttgtatttttttttttttttttgagacggagtctcgctctgtcgcccaggccggactgcggactgcagtggcgcaatctcggctcactgcaagctccgcttcccgggttcacgccattctcctgcctcagcctcccgagtagctgggactacaggcgcctgccaccgcgcccggctaattttttctaattttttgtatttttagtagacagggtttcagcgtgttggaattattttataataattcgaggctggtctcgaactcctgacctcaggtgatccacccgcctcggcctcccaaagtgttgggattacaggcgtgagccaccgtgcccaaccagcaaaaatttcaataatgtcttcatccccaagaagacccacataggttccaaggagacaatatgaaccaatagggagggctctgctaaaaggggaaaaaaaacaacaacagtatttctggattagataaattaatgggtctgtattacgaagggtgctggagtccagtgacatcagtggttgttggcagttgaggataagcagtagcttcaacttagttgtcagggagtattaacgagcaacataataaaagttattgtttatttagtaagtatttaaatcaaaattataagcacaggttctgtatacagatcgcagaggtttaaaatcaggcaacgcttggcaagcaatttaccttctccatgccttcgttaccttttggtaaaatgaggtcgataacagtatctatctcaaagtattttggaaaaaatcaaataagttaatgtatggccaagcacgtcgaatagagcatgatacacacaaagagctcagtaaccatcagctattagcatttttgtgtgaatgttttccctgggcttactgactctgcatgataaccaacgcaatgaggccagtgtttggtttcccgtcttactggggcccagagaggttcagccactagtcctaggccacacagctgcaaatgacaacgcagaagtggaaacgcaggtcagcctgaatctgatgacctttcctttctacctcatcaaaaggctttggagataaaagcaacgaagacccagcagctcttctgtgacaagcaggaatcacggacataggaggcagagggcagggagtcaattgatagcctcaatccagaaagatgtctgcagtatagagcaagccttcccacccagtagcaagcagagctccaggagggctgagaccaacccacccccgaccccctagcagccaggtgagagcccagggaggctggagatgaaaaggaaggtgtggttctgaaggcgaaggtacctgaacctccatggaaccaaacctttcattcagcaaccaagcccttagcagagttgcacataaaacgcgccctcttcttccagcccctgcaccaggctgttatattttaggaattaaaagctccgctctggtaaaagcacaaatgacacatgtttgctgaagaatgtgctgtcactgaccatcctccccgccccctcccgcacctgttttcaaacgtttcagcctctgagtgcagacgatagcctcctcggggttcttctcaaccctttgagagtctgctcagtttcagaggccagctgtggacaaaggaacctctcggcctgtttgtcctgtagagtgttttgaaaagaatgttctcagaataaccagctgatgctaaagcgtgctgggccggaagctttggccaagccaggccgttaatatcaacatgctcatcaaccgggctagttccagaacagattctagcaagagaggccgcctgcagggcacagtccatactgggatccggtttgcaaacacacaggtctggctaagcccacacggacttcactcacagttcactgtgttgtttactgtttaagggtactgggtttttctgccatcacagtaaatggaaaatgcccaggagagggtagcagccagaggccagaggcatctcagaggggccactgggtacctgggtcaggggctggccctccgccctccactctggccagcattagggcaggtgctgggggtaatagccaggagggaggaagagaagggtgggctcccaaggctggtagcttctagaacctgcctgccatcagcccagctcactcctatctgcccaggaaatggggagccttctccaaaccccaaactccagacccactgccaacagcttaaaaagcacagctgtttcctaacctctccaccctcatgtgaattttattattattattattatttttagatggagtcccgctctgttgcccaggctggagtgcagtggtgtgatctcggctcactgcaacctccacctcctgggttcaagtgattctcctgcctcagcctcctgagtagctgggattacaggcgcctccctccccctcacctaaccatacctggttaacttttttgtatttgtagtagatagggggtttcaccatgttggccaagctggtcttgaactcctgacctcaagtaagccacctacctcggctttccaaagtgctgggattacaggcgtgagtcaccacacctggcccctcatgtgactttgatcatcatttgaacttgatttcatctggataaatatgtgaggaggagcaggggaggaagagacgggcaaagaggcctctgtgccctttagggagtggggtgcagtgtagtagcagatggagcccagctgtgctccaggcagagctgggttcaaatcctggttcagccacttgctctctgtttagctgcgagttcaccacttacacaatggggataaaagtgtcctctttatgtggttgttgtgatggataactgaaaggagagactcaatgactggcacccagaggacactcacgaaatgctatctcccttctctctgcatttctaggtcctggcctggcatggagatggtgagtgtgccactgttttatcgcagctgagctggaaaaaaaaatgctgtgtatccagcttccatcaccttgaataggatatccgtgataagcaaatgaaacggaataaacttgaatacataaagccatgtagcattttctgatctccctcaaaggagtctactgaaatactgaagcaaaaaaaaaaaaaaaaaaaagaaagtcatccttgcagcgtgcataatctgatggaggggaggctggtaggacccggatttccaggcattcttcttaaaggctgagcaggctggatgggttgcagataagcctccacaccgagccgagccccggaatcttctgagcctcatccccaagccttggctatagaaactagaaatcatgctttgtgtcagttcacctgagatctcacccaggctcctcaaatcccctcactaagccttctgaaatcaccagaaccatctgctttgggttcagaaatgagatactacaaaagttgacacacaaaggtcattatttctggaggacaaaggggtaaaacaaagcttttcctaaaggctttgggagctactgcagaaagcgactgcgttcccctggctggtggagggcctctcccgtcttctcgcccgggctgcagatggcagccagcttggccacttggacgtgcaggttatgcaatgtgagcatcctaataccgtcttcccctcccacagccgccacccggctgcctcaccctggagctgggattgtccagggctctgggctcattaagactctgtcttcacagccaaagtaaagtgaagaattgaggtaattacctaaatgattcagtaaggaggaaagacaccaccacgggtggaaaaagatagtttgggagactggtccaagtgactggcaaatatcgccacctcctcagctggcaagggaggtaataatacacgtttacttgttcacacccccagcagtaacatttatatgggcggtggggggcagttcatggtgggagaggatgccaagtgtccagtctctccagaacaagaccagtccaggacctcctcctaggcaagaggagagcacatccctcccttgattctggaagcgtcacatgggagaaactccagggtcctcaggcagcagttaaatactgtcatttagagttctgtaatctggctgagcagaaatttccagatttaaattgtgctcacccaggcatgatgaatggtctcagccagtcttgggtttgctccagctccctgtgccggcggtcaagtccttatgcgactccacagtctacaccctcatcaccgcaggaccaagtgcagctgccagtgggtgtccgcaaacagaaaggcaaactgcggagctcccgttggggtccccctgaattaataggtaataataatgacacagcccagcagtacttaacaatggcaaagaggctgtttagcgtccttggaaaaactctggccttgaagtcactgagatttgagctaagatctgaccccaccatcctccaggtgtgaaacctggggcaagttactcaggtctctgcacctcagattcctctggtgttgtcagggggtgataagtgagaattaacagtgaatgtaggccgggcacggtggctcacacctgtaatcccagcactttgggagtctgaggcaggtggatcatttgaggccaggagttcgaaaccagcctggacagcatggcaaaaccccgtctctactaaaaatacaaaagttagcccggcatggtggcacacacctgtggtcctggctactcaagaagctgaggcaggaggattgcttgaacccaggaggtacaggttgcagtgagccaaaatcgtgccactgcactccagcctgggtgacagagtgagactccatctcaaaaaaaaaaaccacaacaaattttttaaagtggatgtaatatatgcttcctagacagtgttgggcttactgtctctaaaaaaaggcagaaaagccagaatttactgcccagtccacaaacggtggctaagcgtacaccacacgaaaaggggctttttttttttttttgagacagtctcactctgtcgccaggctggagtgcagtggcgtgatctcggcacactgcaacctccacctcctgggttcaagtgattctcctgcctcagcctgcggagtggctgggaatacaggcgtgtgccaccacgcccagctaatttttgtatttttagtagagacaggatttcaccatgttggccacaatggtctcgatctcctgacctcgtgatctgcctgcctcagcctcccaaagtgctgggattacagccatgaaccaccacgcccggcccaaggttgcttttttttgacccttgaaacaacttttttttttttttttttgagacagagtctcactctatcacccagactggagtgcagtggcatgacgttggctcactgaaacctccgcctcccgagttcaagcaaatctcctgcctcagcctcccgagtagctgggattacaagtgagcaccaccacgtccagctaattttttttttagtagagacggggttccaccatgttggccaggctggtctggaactcctgacctcaagtgatccccctgccttggcctcccaaagtgctgggattacagacgtgagccaccgtgcccaaccaacccttgaaaaactcggcaagttgcactagagaggtatccttttcccaggtggtttcggctcatccagatcaccttgctaattagtcccggagccagcatgaggtggtgactgacttggcttctggtccagtgcattctcaactctcccacacacttttctgcaagtggaggagtgagagctggtctaccaaggttctgatgaaggaagattttggttttgtctcccttgggatgaacatgaggactgcttgcttggaggagggacccaccacctgtcatctctgccatctaataggtgattgggggaagctgctgctctccacccccgaagatcaggttcatgcaacttacattcatttgtttctcccaaagtccctgaggaaggctgcaagtaggacagggtggagggggatgttcctgagtaacccagtggctggctcaggatatggattttcacaccatgctttgtggaacccggggtctagagaggtgctttgggggctgcagtgcgtgtgtgggtgggtgagtaccagtgccctgggcccctcattcaaccagagccatgccagcccttacctacaaggctaattggtaggagacctggtttgtttacattgcgcttccatttatgatttaatttgaaacaatgatttgttagaagaggaagaagaagaagaagagatggaggaagatgaagaggaagaggaggaggaggaggggaggaggaggaggaggagagaagaacttgggattcattttcctggagtttctgagaacagaacctagacttaatcctagtggctgttagggttggaggtgggtaaccctgttctgggtcagagcaaaccatctcacaccttctggtccacttagacatacattgggcacctgctgggtgcagaactccagatccggtggcaggtgggttaaagtaaattagagatgatgaccctcgtcctttgtgacttggaaagcagaatagacaccccaagggcagaaggggccaacaatcactgtcacagccagcctggtcctcaggctctgtcaccttgtgatgtttgttttttccctttatgtatatgatctattcctcccaatcagactataattttccaagtggcaagaaacaactctcactcagcaaacatttgctaagcccttaccatgtatgccagtcacaggaaaggctcacaatcttgtgggacagagaacagtgatttcaacacggggagtggggaccagggaaggtgccacaaagaaagttaagcttcgtcttgcaagaatagcagcactccctatacctttttccatatcctggggtccagtgcagccagggatgccaacaacaggaccacctggacatgtcaaagggtgctgcacctcctgatgctgggctctgagaacctcctggagggaggggtttggagctgggtctggaaggaggagtccggaccggctccctggagaagggagtgtgtccaggttgggatcacggccagcagcaaaggcaattaagtgaagccagcaggggttggggtcagaggctgacaataaaggccaggggagggaaagccggttaagctcgagcagagcaaaaggcaaaacgaaataaaggcattgcgaaaggttgggagagaaagggaaaaggctggcgggtggagtgttggaatctaacacaactggagtgtccctggactctagcagtaatagaccctcagaaatgtgagcacagaggaacgccccatcttcaatctcagccttgccaccactctagaaagcagagaccctgtgttctccccaaaggacttctcgctgtcatcgcccttctccctcaaccccaagtcagggtccttccaggccctgcaaggggatctggaggagcaggaaccacctgggttggggtggggcctggcccgggcctggcgtggcttgcagggtctggcagctgtgtcccacatctggggtttcaggaattctgacctgaacacgcactcccacactcaccttcatcaccaggtgaacaggcacagaggggaaaggagggacacacccacccacgccctcctccacaaattaaagaatccgcagggccgtcggaggggaggctggatgtcctgggcgggtaagagaggtggctggagacgcgctttcccttcggtcctcctggggaacacttccctcggcttccttcactccaataatgtgaatgaactctgggagagagagagagcgcgcgcgggcgcggggaggggaggggaagggaggggaggggaggcgaggggaagggaggcgagggggagaaaatcctggctggggagagaggggagctcagaggagcgcacagccgggcgggggccgaggctcgaggggcggcgccgagagaaacggggcgcggacccggagcgcggcggcggcgggggaggcgcggagggcgcagggcggaggcgcgggccgaggggggagggcgagcggagagggaggagcccccggccgccgccgccagcccgcccggcggccgcgcagcccgcactcgtcgccgcgcctcggagtttgagccccagcgctgccggagcgcaggcacgcccggggcgcggggtcggagcgcgcagcgcggcgccgccccccggccctcggccccccaaccccggcgcccccggagcggcgcgcggagggaggagggcgggcgggcgcggcgggccgggccggcgggcggcggactatgaggcgcccaccatggtgcgatgcgaccgcgggctgcagatgctgctgaccacggccggagccttcgccgccttctcgctcatggccatcgccatcggcaccgactactggctgtactccagcgcgcacatctgcaacggcaccaacctgaccatggacgacgggcccccgccccgccgcgcccgcggcgacctcacccactctggtctgtggcgggtgtgctgcatcgaaggtacggccagccccgacccctcgccgccccacacacacacacacacacacacacatatacacacgcgcgcgcgcgcgcgcgcacacacacacacgcgcacacactgcccggcgcgcgggccggggagagggtgggcgcggcgctggctccgcgcgagacacaaaggagccggagctggcgggcgggtcccttcgcggccagctgtacatcagctctggtccctctcggctggggacctccccagcacaccgatcccacaaactctccacgcgcacaccccctcgcccacagacacaatgaaacacaccgaaactcaagcacgcgcgcgtagcccgggacccgagcgatccccaggggccgcgccggcacccccgggggaggtggaggctggcgagggggcgggaggaggctggggttggggggagcggacgggagggggggaggggttgcttggcaaccggtgtctgtgctattgctatgggaactggccatcctggggcggggccggccgggggcggggcgcgtcggtgccgctgggcgctttctacaggctcgggctgaggggtgggggcagaagtaggggcagaagtaggggcgggggcgcggtcggagccggggtaggggctgagttcctagcggatctagggtagctgggtaggcccagcccgacgcccgcctcgtctcccacggagtcaccggcccgctcctcgctgtgcggtggggtggtaaggggagcgacaccgagtctcccccaacggagacagcgacctcggtcgcggcccctcagcagggaggctgcggagacctcagtaggaaactagggtgtgcaggaccgatctgcggaccgggaacagactgggaggggcgtggtcatctcgtcggagctgggcgctgcgacccccaaatgcgactggaggctgagtagtaggtgtcatgaggctggaatgctaggggaccaggatttcagccccgggaccgtggggacagctccctactggggaggggcctggatgcctccaacgccaaaatgcgctcggcttcggcgccttccgggcgcccttctgcccggctgcggaacttgaactaacaggtggctggggaggggccacctggtcccagcaaggttgggcacaggtttgctgcttaagcgtggcgctcagatcggggaccgggtggagggagttggtgggggctttcctttgatttttcaaaaacccttggacagaattccttctttttcggtaacctttccccgcgtgttaactccgcccctcggttgttcgggaagttctcccacacacctagccttccttactgcagttccaacccctgcacagagttcagccgcggttgtttcttggtggaggttggcaaggagctcttaaaaccatagcccttttctggccgcatttgaagtcatctgaaaagaggctttgtgaagctggatctgcttagtgaagtcaacttggcccccttttcccctccagaccatgcttgttctcatctcatcggggatcctgcccacctctgtctcccacccccactcccaaaagaggctgctttgccctttgcaatttggagcctaatggcagggctgagtggagtctgcaggtaacagaaatgtgcaatcagtagttcgagaaacacagccacacaaaagagccagtgggctcatgatcacaccctcctcttttcttttgaaaaacatcatttttagtgtgcaattgctcagatcacgaacacctactcctctcctctggagaatgtacccacgtcactacctgccacagcacctgagctggatacagagcaggggctgcaatgccccatattccacctcacaagcaagttccatcaggtgccaactgcctggcacagtaagtcataagtcatgctactggcacgacccgaaggcatgtgtggacccagggccttccagtttcccagtggaaattctgaaactaactcctccccgccagcaaacctggcttcctttattaattcctcatgctaattaggattaatgctgcacttagcatcttgccagctgcctcgagccatttgcacttcggtgttcatcaagagagccccaagctgatctgggcagctggctccactagcagagggagccatctgggggacctcaccgaaagaactgggctgcctgtgttattccccaatgctcagtggttctgagggccagaacatccttgtgggacccagggctgggagagtgggttcaagattccttggctagaatcattgtgacagtccctcaacctgggtgggaactgacagcttttctcataaaaagcacatccctagaccaacagctctcaaccacctgacacctcacctcctacgatgcctccacctgccagcaagtagccagagctgaggcctggacagcaccttaaccctaggccactttctggggacacggagggagggttacctccgtgttggctttcatgtataagatgcattgtttccacctgttctctagaaaagtattccaaagcattacctccaaagcaaaatgaacagaagaaaatgaaaaaatcaaacctctgggctgaaactaaagaaacactgcagcaggcagctaataagactccgaggataaaggcagaactctgaagggtttgctggcaactggcaaacaacagattcagttgcatgttcgtgtcttataaatgatgttgccgggccaggaagcccagccctctgtgtgcttaaggtatccatgcattctggcagggctacgtgcaaaagactgttgctcccagcttcacagggctgaccttgtcttagcctctttctacccctcaaatcaaagtctctcccttctgcctgcccctctgctggaaagtgtccaaaatactcaagtgtgcagagccttgtgcacattaccgcgtggcctgcccatgacagccctgggaggacgctgtcttcacccccatctgcagatgagccagggaggtgcagagaggttcagggacttgcccagaggcgcccaggtaggaggcagccgggccagattggagcctttgtctcactacaaagctcttctcaccagatcatcctgccttttcccaaacagcttctgggttgccattaaaaatagaccaagtacttgactacccagtggagcccagctctgaggttgggctggcggcagcatgaaggcattagaagtgaggatgcacaacggatacataaattgcgtaacacaccttttcccttcttttctcttcccttcccttcttttcccttctccctttttctcctcctctcctctcttctcccctcctcccctctcttcttctttccctccccttccctcaccttccctcccctcctcctctccctcctctcccctaccctcctcctctgcctcctctcccctcccctcctcctctccctcctctccccttccctcctcctctccctcctctcccctcccctcctcctctccctcctctcccctcccctcctcctctccctcctctcccctcccctcctcctctccctcctctcccctcccctcctcctctccctcctctcctcccctcaccttccctccttctctccttcctctcctcccctccccttccctcctcctcccttcccttcctctcttctccattcctctcttctctccttttctttcctcccttttcctctttctctttcagtctttgtctatgtctctctcccaatctgtttctcagtctctctgtgtcactatctctatctctttctcttttttctctccttccactgtgtgctagactggtcaccacagtcagtcatctccctgccttctgagacactcacctcattctttgtatctttggtgacacccagccaagcctgaggacataggaaaggggtagtaaacctttcttcaaggtttatcaaaggcatcaccaaccaacatttgttcaatctcatgcattctggaattcagtgggtacagaatgtaagcaaacatcacggaacatgtactcttgccagggacagaagagcccgtgtagacgtggaagggaagaggagactctgggcccagagggcagcagcttgtgccacatgccaaagccctgccacccacaccaactctagagaactcactagagccacccagtccccgtgctgccatcaggaaagctctccacccaaagagaagggtcctggcgcctcagccgtgcccctcccccaacctgatggagaaagctgcctccagcatgcccacagctctgccagggccttaatatagcagacttgatgccaggggtggcccccgcacctgttttgtgccagctctgtgctgggtactagtgggggaagttatggagaaggttctggaacctgagagtgaaggagttctttgccccagtcatgttcacgtgtctcacctgggcagcatcttgcacaccagtgtacccaacctttcttcccaccatggcacactgaggaagaggaagcattagccctgcaccctggggaggggattgagaagacagccatggatgtctcccaaggggccccagctgccccgagccccgcccaggtgcccacaggtgggaggctttttccaaagagtttcctgaaactccttcctggtgggtcagctacatggctctgtcttaaaccacactccctacataggaccattcagagaggtttcatcaaataatagcctttctccacccactccaggcctggtgctgggcttgaaacttttcttatctgtgtttgctttcattttctcttgaaataacccagaggcagcctgtccagtcaggcccaggtgagtgacagcgtcagaacaggcaccccttccctgacgcgctaagtaccaccggccagaatcctcaccctggacccccttcgcccttgggtgctaattatcacagccatcactatggaagaccttcatgcaggactcacattcgtgcatgtaattgccagcaacacctcaaggtagatattaattatttgccttttatagttgtagaaaatgaggcttaagacgtgcacagctcctgagtattgcatctcactccccggatcacggccaaggtggaacataggagctcttctgtccactagtcaggggaaatcctttatattggaaccatgcagatttggaaggggcaggtaagggggttgttggagtcagcttgggctgacgtcataaaatatgatagactgggtggtttagatcacagatgtgaacttctcatagttctggaggctgggaagtccaagattaaggtgtcgctggactcagttcctggtgaggtccctcttcctggcttgcagatggccggcttcttcatgcaagttccacagggcataactcaggagcaccaagggttatgggtgtagcatcagctgcccctcacaccagggcagggtttctcagcctttgcactgctgacattggggccagatcattctattaaaatgctcacatggtggagagagagggcaccagttttttggtcctttcttacaagggcattggtctgatcatgaccctcacaacctcatctaaacctaatcacttcccagaggccctgtctccaaatagcattgtttacacagaggattatgtcttcatcatatgtattttgggggcacacagacatgtgtccatcacagacatgttctcgccctgtgtctgcttcacagctggtgcttactctccaatcattcaggaagaggcccttcaaaaagtctcagtaggaaaatcagcagatctttaaaataaatcccctgtgtcagtctccaccaacagcccagactctgaggatttccaggacatagtgacagaagtgccgagtaggaaggggcctcaggtcaccagaccctgagtgtcagaggcgaggaagccacagctaaactggaacagcaatgtgcaggggagggggcctggtgggcctctgtctcctcatctgaaaatggggcctgactgttctggaacactcctcccacctctcactctctgtcatacaaaccccggaaagcctctgcccatagcttccacgctgacggtgggtcggtgtggcctcatggagggtccttgctggaggaggggtttccagccagaagagccttgaggaggggtttccagccagaagagccttgaggaggggtttccagccagaagagccttgtggagcttacttagttcagtgacttttgacccttttgctgctgagacacacacacgggctacaagtcacccgcctgctgggtgtgctgctgttccctcattcattcttccagcacaggctcactgaacacctggtctgtattagacatgcagggctcagggtcacagctgcagaaaggacagacaggtccctgctgtcctggaattgatactcctatgtatgaggcagttggcacttctaggtgcagatttatgttacggtgaaaacagagcagggggcgtgtggggagcggctggagggggccgctgttggctggtcaaggggacaggaaattgtcagggaaggtcatgtttaagccaaaacctgaaccagaaaaaggacctggagggaaaaccttctaggaggaggaaagggcgagccgaggccccgagcaggagggaacctggtgaggatggaggagagggagcaaggaagaggtcaggggttgggctggggaggctctgaggtcagggtcagaagcctgctttatttcacatgagatcggtgctattgcagaacttcgggcaaggaagtacggtgatctggtttatgtttttagcagaccttctgactgcatttggagatggagatatcaggaggcaggggaggctaccaggagacccatctggacattgtggcagactggagacctggggctacgtggcagcagcagagatgggagaagtggagggatggcccggagaaggggatgaggaatgaagggtgacctcccagatttggggccacagcagccggccaggcgacagcaccatggccaagtagggaaagacagaagaaggaacagttgtgggaaagaaagctaaaggtatgcccatgggggtgccagattctgacactactgcctgacaccccacagcctaaagtagtgctggacagttccatagagcataactcaggagcaccaggggttatgggttcagcatcggctgcccctcggagcagggcagggtttctcacctgtagcactgctgacactggggccggatcctctgtcacaggagctgtcctctgtgctgtaggtgtttagcagcatacctggcctccccgcactggaaccagtagcgctcctccttctccagctgtgacaaccaaaaatgggctcagactttgcatatgtccctggaggacaaaactgcccccatggagaacctcttgaatctaggggaagcatcgtttagggttgcagggacaaagggcagagggggaaggcatgattctttgtagctggaattccagtcacttcacttcccttcgagaaagcacatggggcctggcgcggtgactcacgcctgtaatcccagcactttgggaggccaaggcaggtggatcacctgaggtcaggagttcaagaccagcctggccaacatggtgaaaccccgtctccgctaaaaatacaaaaattagccgggcgtagtggtgcatgcttgtcattccagctactcgggaggctgaggcaggagaattgcttgaatgtgggaggcagaggttgcagtgagctgagatcccaccaccgcactccagcctgggtgacagagtgagactctgtctcaaaaacaaaaacaaaaacaaacaaacaaaaaaaacagaggccaggtgcagtggctcgcgcctataatcttagcactttgggaggccaaggcgggtggatcacctgaggtcaggagttcgagaccaccctgaccaatatggtgaaacccccaactctactaaaaatacaaaagttagccagaatggtggcaggcacctgtagtcccagctactcctgagacaggagaattgcttaaacctgggaggcggaggttgcactgagctgagagctcgccactacaccccagcctgggcaatagagcaagactccattaaaaaaaaaaaaaaagcgaaagcacatgtaacataagtgggggaagcgatcctatcaatgggatgacctggcatatgctttaggggccagccccagtcctttattaatagtaatgctttccctacccacaatgcccagaaggcgtccaccatggagctgagaaccacaatgctgcccagttcttatgctgtgcaagccagggaagctcaagacaggtgaggcagagtgacttacgcaaggtggcatggctcaggagcagaaagtggctgtggggctgcctggctggggctctgtcccagcataacctccccttgggtgcgtacctgggcaaaggttgggcaacacacagccaccgtagcgtgcggcagcaataggtgcagaacagcgatggaaactccctcccgtggtgtctgtgcctcgggcctccatcgcggttaacctgcatacagtctcagagaagcggcactgccctccatgacagcctcccctcaacaaggatgctctctccagcgggtgcatgggcttggtctcctgggaaacagcttcaaaaagggaacaaactggttctaagctccagggagaggccagggagggcctgcctggatctgcccccaacgtcccgtcccccaattcttgttctgtatccccatgagactccgggaagtgctgcgcgagactctcttttctgaactgcgaggcaggacatggtaccagacaaaggactttttttctagcattatcaacttcttccaatgaaaaacttttcaaagctgtgaaaatgacatcccgtgattttactgtttgtttacttcttcccccttcaaccataaaaggaagaaagggacaagataaataaagagatgagggactggggcggatagaaaaatcaagtaggaaaatgagagatgatggctgcgtccagctagtgtccacagtaccgactgcagaagccagctgggggccgaggcaggccacagctttgtcgctgagcttcctggaggccaggacaaagaaaggagtgtggccagaggtgtgttcacagggggcatacaataaaaggggaatatttcataatagaagcccagctcttcctgaaacagaggcctagaaaaaacgatgccccttattcgagggacattctgttaaaatggactctgttgaaaaggcagcatggggtaggggaaagaggccaggctttggggttggacctctagagttcaaaaccccagtttccaggcagctgtgtagctttgggcaggttaggtgacctctctgagttcttgttgatgtctggaaagtgggataatgaggcagtgaatggaaaggtgcccagcacatatctatggatgccccccgcgcagagtgctcgttagggtacctctgggtggaatcagtggtccctggtgtctgcattcttcgaggctcctgggtgtgagcctatgaggtggagacaatgacagactgagctgccaaccccgaatgtgcacaggggacccttctggtgaagcaccacagcctttacaaagcagccacttccgcccccacaggccccaggctctctgcaggcttttcccagggtctatctggagttgggcttgagtcaaaccctttcctcccccattagtccacgtggaagccgccgcatcagatggctttgcggtgcatgggcttgcaagggctttggactttaactggagctgctcttgcacccctccctccctcccaccctgacgccgtgacttgcctctgaggactgtagacccagagcaagctctccacgtcaccacatccaacacggcctgcctgctaccatggcaagcccacagaggtggaggtgtcgggaaatgctgtttaactgcctctcctccttccaccgctatcaccccatttctgaaggagaatgtggaaaggtagagggcagtttcttgactcaagcccagctccagacagagcctgggaaaaaccaaatgagtaaaaatcatcagtctccctggctcacctgccactagcatctgtcacctcctgggcccagggacacaggaaggggctggatcttcattccagctccccctttcctccccaccatgagtccacatggaagcagcagcatcagacggtcagcattgaagccacatggccccgggtttgagtccagactcccacttgtcagctgtgtgtcttcagacaaattgcctaacctctctgaactttgttgttcagagagcaatttttccttcattgttaagttaggagcatcatagaatcaaccctggggttgtgaagttatatgagaaaaaacatggaaaataccccttctcgtgcctggcaccttatagatattcaaaacatatcatcgctttctctctatttccatgtttcctgaaccatggaatttttcccagaagacataagttgcccaaattttgtaagctgccccaggtcagctcaccagcctgcagggtccaggaatggaagaagctgagcaccccccagtggaggccacggtgttatttcctcacctctcagaggcagggcgttctgaatggctcctgtgaactgcaaaatcagagactgaggctctcagctgggagctgaaagagggcctagcacccaggctgtggctgggctggggatggcagccacccaggtgtgtgttcccaacatcacattttctggcacagtgactttgccaagtgccctagcctggccccaaggaggcagagaggaactggggaacttccagtagcctcaggggtgggaactgagtgcccagattgatactcaggaacagagacagcgctcgtgggggttgtgactgaccctcgcatctccctgtcacttaccgacacctgccgagagccctgccgcgtcaggtgacctcccagtgtctcagggccagggccagggtagaggaggacaaggcaccggagtgaaaaccatcaggattggagtcaggggacctgtggcctggtcctgactccgccactcaccatctggacagtctttggcttgtcactcaacctcctagagcctcggtttgctcggctgtcaaattggcaaataaaacctgtcctcccctccctcctccctctgtctttcctctttcctcctgtcgtcctcccctcccttctccctccatcctcccctccctccaacttctttccatccctccatccttcccacctccatccctctctctaacttccaccctcctccctccaacttccctccctccttccagctttcctctatcctctccatcctccctctttccctccctccatcctccctccctccttcctctctttattctttcttcctggtccctccctccctgcatcttccattcctcctttctcctccccatcgtccctcctccctgccttcatcttctttctatccctgagtcctccctgccccgccccacccccagggttctgtgaacatccaagccaaggatgtttgtgaaagtgctgtgagaagcacagcggccgtgctcccacagaggcaccacacaggacacagtgacttcaggctccttttcttggaaacactgttggctgtggcctcttttccctctgacaccttggcaaggaggagcctgctggtggtaacctcacacgtcggctgtgcttcccgccagtgtggtctcgcttggacagcaccgccccctccgtctccagcccactcagtcaccagttcatccatccagcaaatgctgccaagagcctgctctgtgcctagcagagacagaagtccctctcctgcagtatccctcggggttcctttcaccctccccaggcctatgggctccacctccgacacacgcccactgccttccttccctccacctctctccatctcagagcactcccagctctgtcatctctcgcctggatgcccgctgtagagtcctgactggtcactctccctgctctccacacacagccagaaagagcttgtaaaaatatcaaccagatcacatcattccccagctcagtaccttctggtgagaacacatccctctgtgataaagtcaggctcattccctgatacctgaagccccatggatccagcccgccccacggatccagcccgccccactttctgactctccaggagcttcgtgcgcagaagggagtcgaagatgacatctgaactaagtctgtgtgatggtcaataggacgggggttgtgggtgggggatcgatgagacctgcatttgaatcctgctctgccctgtgttagctctgtgaccttggacagactccttagcttctctgggcctcagttattttctcatctgtaaaatggggatataatgatagaccctcccctcccccatctcatcagatgatcagaacgattaaatgagattggacatgggaagccctgagggtggcccaggcaccacggggcagggagcagagctgggtgcagaaccagacctcacctctctcttgtttttttctgagagctaccacacgcacctgcagggccaggggctgccttggagagcagaattacttaaaactgtgtcgtccttaggtgtttgtggggcacctgctgagtgcctggcttcaggccgggcattgtgggcacagaaagcccccagggtatttactctctggttctggagaccctggggcaccagcagtaggacagacaccatacagggcacgatgtggagagggcaacagaacacgtcctagacgttaggggctcctcccggacgccctaaggaggcctatcccatagggttgtcaggagaatcagatgggaaatacgcacagggctccccgcacatctgtctcaccatagacctgaaataaacagcaactcttttgcttggcatcttggagaggaggtaggatatggtgataaagggcccagatcccagagtgagtcagggtttgaatccaggatctgcctcctactagctgtggggccttaagccagtcattgcacctcctttgaacctcagttgctttctctgcaatatggggttgttagcgatacctgctatgcaagtttgctggcaggagtcgcgataaagtatctaagtgcttgctttggagctggcataacatgtgttcaatgcatgtagttattctcatctgctaacccaaaaaatacgtggtacatggggacaggggaggggacccagagtgaagatgggtctcagaggaaggggggcttcggttcttaattcccagggttcctcctgcccacttcacccctcccccacacaccaaagcacaggcaagaaaaggacacagatccccaaagactccctgaggacatttcaggacacccaggctcccttccaggggccggacagtccggccaaggccatgtcaccagctcatcattaacatgcgatgggggagggatgccccgtactcgcttccggccctcagctctgaaaagcctgataacaagtgcacattgacggcccaggttccccagggcgagcacgctgtccctgcctcgcatctgagccttcgcccgagacattttctcgcttcagcagtttggcatgtcatacaaaggggctctgatttttcctgatatccaactcctcttgcatgaaaaatggctttggttgtctttctgcctgcggattcctgagcgtgagtggaggccagatgcctggtgggcagagtgtcctcacttgctcaaccgtttggaggatctcccgtcttctaccttgtggcctgcggccttgaggttcagtctctgggggagttccctgctggctgcaggcctgccccgcaccctccttccagccaacccccttccctcaccctggtggtttctgatgtgtctccagtcttctttgtgctgctgccattcgcacagtcccagtcaccacacccacacggccaacctgaggttcctttttgtgtgagcatcctctgcaacccaaacccattttccccattccccagtgccgccttctcttcctctcgtccctctttctctcctttctttcttccttgtatttctaattaattcttccccttttccctttgagtctgccatctttgtaaaccacgcaagccctctcctgcttcctgttcaagtcagtcttttgagagttcttgaagcatttcctagataaaaatgtattattttaactctgtgattattaggagggttattaaacatgaagagaattctattaaatggcaaattgagtgagccaaaaacccacagatgtggaacctttgaagatcatctggtacgaaacagatgtgactgtaccagtggctgctttatcaagctgggaacaaatattggaaggaaattcaccaaaatgttaaactgatggtcatgggaatgaggagtgacttatctgatctccttcttctttcgaacttctgtgatgcagagaggaaaaaatataaacccgatatttagatgaaaagcatcccaagcccagtctccagacagatgaatgggtgtgtatgccgatttgacacggccggtgtttgttcttttcatgcttttttttttttttttttttttgagatggagtctcactctgtagcccaggctggagtgcagtggcgcaatctctgctcactgcaacctctacctcctgggtcctggttcaagtaattctcctgcctcagcctcccaagtagctgggattacaggcatgtgccaccatgcccagctaatttttgtatttttagtagagatggggtttcaccatgttagccaggctggtcttgaactcctgacctcgtgatctgcccacctcggcctcccaaagtgctgggattacaggcatgagccactgcacccagcctgttctttttattcttaaatgcatccaggaacacgctcccaggcactatgcccagcgacttcttgccagcattttattacaggccacttctgacttataaccaaattgattcctggatcaaagcctttgcaagccaaccacagttgaatctttatttcctgtcagcacaatttccacattgggcttccatccctagaaatccatctcctacaataaaagtgctaaaactgaccatgaaagtaagtgagaaggaaataaaacccagatctatgcttttacaaacctttatcacatgtgtaaacctaagtacttaatcggaaagctgtgtcgtgagaggcccctcagggagaatttttctgcctgagtcagatggctcaagatttcttaatatgtgactccgatgaggtttgagcagaagacgcttgcttttttaaattatttccctaggaaactgtcctgtggcaagcttaagcaggcttcattgcaccaaaaatcttcaaactctttaaaataaaagattcttttacctcaaaaattttccattgacaattccctttgtgtaaattcttttttttttttttttttttgagactgagtttcactctattgcccaggttggagtgcagtggcacaatctcatctccctgcaaccttcactgggttcaagcaattctcctgcctcagcctcctgagtagctggaattacaggcgtgcaccaccacacctggctaatgtttgtattttcagtagagacagggtttcaccatgttggccaggctggtctcaaactcctgacctcaggcaatccgcctgcctcagcctcccaaagtcctgggattacaggcgtgagccaccgcacccggccttgttagaaacatctttgcatttcttccagaggttcctctaaaagaacaaaaaaaagaaaaagtaaataaaaagaaaaaaatctttgcatggtgaatactggaggaaaggcagtttccaatgtgactcgtgcgaccctgaaacaatccctcactctttgtggcagtgagtcagttgacccttcaaatgtccatcaatgcagagacacaagcttccccttgtgtctttgttgccaggtgctcagaatgttaccttctgttcttagcaagagtttcagttaaggcagaagcgcgagggaatatggaaggagatgctgatcaagtccagcatcctccagctgagattcccagtactaggactacaaaattatccctcagttctaatcaaatttgctaccttcagtagtaatgtctgttcctttcttcttgctcagtctttcctatagctgaaaacaaagcaatcatcttcgacccttaatagcccttcatattcttgcaagcagtttttttgggttcttctttggtctacccatctctggaggaaagggaaggaaatttacctggttttttgttttgaaacctagttgctttctctagactgtggcttgaaacatacaagcctttgtgcaaagcactgggtcagggttgggggtgctggggccgagagaaccacaggagacccactctgtttgtcaccagtggcctcttgagccgcccgtgagtaggacggtgctcaggcgagcccggcaaggtcccctccgccctagctgcttatccattcaacaccctcctgctggctcctctgtttagagtccagaattatgaatagtttaaaaaataagagcaaatgcctgctgagcccttgctatgcaccaagcacattaggtattatctcaagaactttccatatgttatctcaacttatctttgtaacagctataatttcacactagttaattacttaactatgatttaatcagatttcaggtatattattgcagaaagagagctaactcttataaaaaaaaatttttagagatacggtctcactctgtcacacaggctagagtgcagtggtgggatcatagtgtgtccagagttgattcattctgataggtttatgggctcgctgacctcaagaatgaagccatggacgtttgcggtgagtgttacagctcttaaaggtggcacggacccaaagagtgagcagcagctagatttactgtgaagagtgaaagaacaagcttccacgagtgggaggagacccaagcggattgccgctgctggctagggtggccagcttttattcctttatttgtccccgcccatgtcctgctgattggtccgttttacagcatgctgattggtccattttacagtgttgattggttcgttttacagagtgctgattgatctattttacagagtgctgactggtccattttacaaacctctagctagccacagagtgctgattggtgtgtttttacagagtaccaattggcgcattttacaaacctgtagctagccacagagcgctgattggtgcattttacaaacctctagctagctacagggcgttgattggcgtgttttacaatcgtagctacagagtgctgattggtgcattttacaatcctcttgtaagacagaaaagttctccaagtccccactcaacccaggaagtccagctggcttcacctctcaatagctcactgtggctttgaattccagggctcaagcaatcctcccacctcagcctcttgagtatctgggactgcagacgtgcaccaccatgcccatctaattttaatttgtttatagagatgaggtcttgctctgttgcccaggctggcttcaaactcctgggctcaagcgatcctcctgcttcagcctcccaagtagctggatttacaggcacaagccaccatgcttggctatgagagcaaactctactgtggttcctattaggtgccagggattgccctgtgcactttatatagattaacttgcttaatcctccgccagcctgtgaggcaggtgctagcactacttccatggtgtagatgcagaaactgaggcacggggaagttaagcagcttgcccaaggccccggagccaacaagtggtgaagtcagaattgaaacccaggctgtctggcttcagattccattctcttcattcggctatacctcttcccagttgataacagtggtagctatgacatgaaaatctctgcaggcactttgcagagttcacttcctcctcacaatgcagcatggatggcactccccttgtgggagactcaccagcctgtgacaccccccagcacctgcacccaggtctccagccccaaagcccctggcaagatctttctcagccccatgctaaaaacagtcacatgcctgctgcacgctggggaaaaggcgaggttgtggggtggctcagtgtgctgcgaatatccaaaataacccatggtgaccccaggaatctggggccacagtgaaggctacccaggctggaggaggagtttagatgggaagagagcaggacccgcccctcaggtgtgtccccgtggttgccagatgctggctgtgggctgggctggcacagcaggcttcttggaggaggtgggcacagcgtcgtgaccagaacaacgcacgatgccaggccccaggtctgactcatgcagtctaaagagaaaggattctgctgtcagactgagggcggctcttcagatggggcactctccgcaaagaaggtgaaaatcattctgctcgagacagatcctttaagaagacattaaccatgcacttcaaagccctggaacccatgttttgcaggggctgccacccactggcacactttcacacccaggttctggttgttggcattcacgtggtgactcccagctcgcacaaagcagatagaaaaacaggctgatcatactgtgtgtttccattcataccctgttcaaaagcaggcaaaacgaatgcaaggcagcggagctcagcacagtggctccctttgtgggctgttgtctgggagggtgcaaggtgtgtgaacaatgttctatattttgatcagggtgctggttatacgggtgtagacacatgttcatctaactgcacccttaggattactctctgtagattatcttcagtaaaaattaaaaatagtagccagctgcaatggcttgaacctgtaatcctagcactttgggaagccaaggcaggaggatcactagaggccaggagttcaagaccagtttggcaacataatgagaccccgtttctaacaacaacaaaaaattaattagctggacatggtggtgcacacctttagccctagctacacaggaggctgaggtgggaggattgcctgagccctggagtttgaggctgcagtgagccaccactgcactccagctctgggcaataagcaagaccctgtctcaaaacaaaaacaaaaaacaaatataggtctgggatgacaaagactcacagatggcctgccaccagcctgcacccgcccccattcatccccaactgctggcctgtattttcttcagtcctaggtgatccagcaaatactagtcgagaatgtgtgtgcctagccctgtgctatgttctggggactcgttcattcattcattcagcacttatttttgcacccagcctcttgggaacagggtttgaccttctggaggagaaagatactcctgtatctgcagattctgagactcggagctgttcagaatgacatgacctcccacttgttcctgcctcgccatctgcttgtgctgtctctcatgggatcctcataaccccacaggaaggtgggttctgtcaccctggattcttcacccagaaggcgaagcagcaggggcagagtttgacttgaacccgagcctgagtttagcctcgagcctgagcctgcctcagggtccccagggttaccaggctgggagtctgtgctgacaacaagcccagtgtcattctgctcacctcgacctcatccttggggaaatgccccactgagctgagcacaccagctcaacgagaccagaccaaagggtggcaggggactgacatggttggggtgaggagggtctgacccaagggcaaagaatggccttgcttctctgagaccgtcctctctcccagcctgggcagctgtgatcgggagatactgcctggtaccctgctctggggggctcccaccacccgccctcatcctgccttatctgtttccaactccctacctgcattttcttagtctctattcaaatccagaaaatgctcattgaggatttgaaaactaaatcccaggctgagtcctgggcactcccagattcattcattcattcattcagcaaatattaatattgagtgtctgctactgctcaagcagcattcgaagtgatagggaaagttttcttcatagcagagaataaaacagacagcaattcagtaatgagtctattgtccaagagagacaaacaaaaagcaagaaaagaaaggagtgtcagggtgaggcttgtgatgttagagtgtcatttgtcttagtgcactcaattccagggaggcttggcctctatcagcctgggaaagtcccggggggcttcccagaggaggcaacattactcttgtcttgcagaatgtgtaagagttccccaggcaggggaatatacagaggcacacgtcttccttcctgaatgcacacatgcagtctcctattcattctttattcatccagcagacattttatggagcacccagatgaaaagtagaatcctgtcctgttcctcaaagaaatcagcgtccagtgggagaagggagacagagggacggccatctgttacgattctgtgtggaaatgcgttaagtgcacgtccaaggagtggcagtagcacagagtgggaagaggaaggtccttggaggcaagggatgtggtcagggaagtttctagatggtaagtcatgtgagccagtttaggaagatgaacacaagtttgtttaaaaaaggaaaaaaaaaagaagaagaagaagaagaagaaggttccagacagaacacaggcaaagttccagaaacatcatgcctgctccggggcattccatagttacccagtgcctaccaggggcccccggccctgagccagctcctgggatgcatgggacagagggattgttcccggatgcctaagaaatctggtactatcgaaacagaaagcctcttatgagaggaggccagaagctggggacagggaggtaggagaacagaagcaaaagggcccttcgctccatcatacctgcttaggagcctgcctctggccctcctggcccagccgtgtgggttgagggtctcaccaaggggacattcagagctgatgtgtgtctggagagctcatgtggcttctcctatgcaggacggagcggagggagcaaggctagggcaggggcacttgttggggaaacactggaaaattccagcccggggggatgagtcctgaattaggacagtggaatggaggagatggtggatttgaaggagatggtgccttggaaatagactggatgcaagaatgagagcccattatggggaagggtgatgtcactgagcaagacaggacacacaggaagagcagaagacatatgagtgaggcggataagtccagctccagggggagggcacagatcgcttggagcagatggtacaaggcttgcgtcttaactaatgtcttcactctttaactatctccaatttacagagagaatttagcttccagtggttgctggcaatctttggtgtcccttggctttgtagaagcatcaccttcgtctccgccttctcttcacatggcgttttccctgggtgcatgtgtctctgtccaaatttctctttttataagaacaccagtcatactggattagggtctaccctaatgacatcatccttaactatactacatctgtaatgactttatttcaaaatgaggccacattctgagatactgggggttaggacttacatgaatggatttggtgtggggaggggacacagtcaattcttaacagccacatcttgagtgattccatttatacgaaatatccagtgtatttacagaaaaaagacagcagattcgtggttgccaggggctgaggggagaggggaatgggattgactgcttaatgagtacagggtttccatttggggtgatgaaaattttctgaaacaaggaaacaggctcagaaagattaggtaacttgcctgaggtcacacagctgctaagtggttaagatgggatttgttccaaagtttgtattctttctattgcaattgggttcaagtggaggtttcttcttggacaaattatttagattcccagaccctcatttccttatctacacaatagagtcaacatatcacccttatcctctacccatgtgagaattcacagaactcacctagtgagagtcactggtacattctgaatgcttactaaatggtcattatcattactctctcagtcagggtccatccaggaaaacagaaaccactctgtgtctttcagacagaggaaatttaatagagggagttgatcactcgggtgatggaagagctgagaagccaaacaggagaagcatcaggcactgagatgtggggctgcaggaagcccctttcagagagaaaatgagagagtggttttaccggaggaggttgggaccacagagggaggggctttccagaagtaactagacccccagaggagatgcagcagctgcagaaacactgtccaaggaagagggggcgaaataccctgactttccccttttgacggccctcttttccatcagagcctcctactgaccaaacctacccagaagccaagggcaagggagcctgggaagcatggttcctgggataaagaagcgatctcagcggtgcattcagctggtgagcagagcttactgttggtctctgtgtgccggttcatgcacgatgttggcatgctcgagactgggcatggtcccagtgtgtgcatactctaggtatgcacccaggaaaggaggcagagtgggagcccttgagagtgtgctttatggctatacatcctttttgtgtgtgtgtgtgtgtgtatatatatatatacacacacacacacacatgcaactgcacacagtgtggtcacagagctaccaccctgatagcacccagcttggctgcatgaatccccgtgtactgcacctgggagcatgtgaggccatcacacagcgtctgcagttccatctgcctggagctcatcctgtcctgttgccatggcgggaagacccaggctggagcacacgcatcaaggctcagcgctgtctgctccagggtgtcctgtgactcggccagtccggtcatcagaactattgtgtgcatgtatctcatctccaaacagccgccggcaagcaggagaggaaaaggcccttgaatctgcggcaccagcttttctttgaagtgaggaagcagagtttctgtttttcttggaaatccagctccatcatgagggatgttgctgcatctgcctcttggctccgcgtgtctgcctggcctcctgcagggcctccccgcccatccccatcacttgccccctcgcctcgcctcacctcagtaatgcatccggcccttggatctgtcaccagtcggttgcaacagagcagctcatggtctctgctgctctccagaggctctaaggagatatgggacgtcagaggggtctctttgcctctcttagaccagaatcttcctgaaatttcttggtgggggcttcccatttctagttctatcttacgtaaggcgttgaaaaggcaaaggaggcagggcgcggtggctcacgcctgtgatctctgcactttgagaagccaaggtgggtggatcacttgaggccaggaattcaagaccagcctgaccaacgtggtgaaaccctgtctatactaaaaatacaaaaaaattagctagttgtggtggtaggtgattgtaatcccagctactcaggaggctgaggcaggagaatcacttgaatccagtaggtggaggttgcagtgagccaagatcatgccactgtactccagcctgggcaacagagcaagactctgcctcaaaaaaaaaaaaaaaaaaaaaggcaagagagttaaatgagaagagaaacagaagctgctaagagctttttattcccggcatctttagcttcagggagaattatggatggaactgtgtcccctaaaaagatatgtcaaagccctgatgcctggaacctgggaatctgaccttatttggaaatagagtctttttggatgtcatcaagttaagatgaggtcatactccattagaataggccttcgtttaatagactgggttcttataaaaaaaaaaggagaagagacagacacagacggagaaggacacagaagatggaggcagagattgcagtgatgcagctacaagccagggaatgttcggggttgccagcaaacaccaggagctaagagaaaagcatggggcagatccttcctagatccttcagagagagcatggccccactgacactttgatgttggacttctagcccccagaaccattcgaggataaacttctgttgttttaagccagctcgtttgtggtacattgtcatggcagccccagaaaaccaatacaaggagattaattcagccttgcaaataactgccgaattaaccacgcttccgaagtgtttcccatgctgctctccaagagggggtagcctcaaataaaagaaagttgattttgttagcaacggtgtgttgagaactccctttgtaggctaagaacatgtatgtgtcacctccctgaaccgcccaccaacctcccaatgtgggtactgttcctttcctgattgacagtggaggaaactgagtctcggatgaaacacttttgtcgaagcaacatgaaaattttttctttctttctgggtcagtgactatttccaaggctggactggggtcctgaaggcaaaatgagcgactttgggtgaaaaatacattcattttctttgtgcttcttaacaaattgacaaaacttagtggctgaaaacaacacagatttattatctcccagtctctgtggactgggagtctggacacacttagccgcatccgctgcttaagtcttcaaggatgcaattgagatatttgccaggcggcttccctttcttagcttggggacctcttgcatgctcactggttgttggcagaattgacccggttgtggttatgagacaaagactgccattctcttgctagccatcagccaggacttctcagctcctgggaactacccacagtccttgccacgtggcccccttggcagttcactgcatggctatttgtttttttccaggccaacaggaacatctctgatttcttcccctccaatctgccacaacagagtcttatattacgtaattgaatcatcatattcacaggttcctccaacactcaaggggaggatgttatacaggggcacacagcagcgggtgggtatctttcgggccatcttagaactctgcctaccacagatggaaggggctttggtgcaaagggtggtctccggtcagatgaacttgactttgatttctggttctgtccctcactaggggtggagagttgatcttacgaaattttcttctgcactctttaaatctaagtctccttattttattttattttattttattttattttattttatttatttatttttgagacggagtctcgctctatcgcccaggctggagtgcagtggtgtgatctcagttcactgcaagctccgcctcacggattcacaccattcacctgcctcagcctcctgagtagctgggactacaggcgcccgccaccatgcccggctaattttttgtatttttagtagagacggggtttcaccgtgttagtcaggatggtctcgatctcctgacctcgtgatccgcccgcctcagcctcccaaagtgctgggattacaggagtaagccaccgcgcccggcctaagtctccttattttaaaaaggggtacattaataccagactcaaagggctgatatgaggattagatgagtcaaaccgtaaagcgctggcagttgctaggagctcggtgaatggcgctccctccctcccttttgcaagcaaatctccagcacagaggaaaacacaggtgggtggtgcaggtggaaggcacctggtcctggagtcagaagcctccctgggctccagcttgatctcggcaggtcctacccatctcaccgtttccactgccccttccccttctcccaaatggtaagaatcacagcagctttgcctggtgaaagatgaagatgaattgccatccccaaacaaacaaacaaacaaaaaaaaacacttccgaaagacctctccttcctgtactgtgtgaggcatgtttctcctcttcccagaagccagatcccataagaggagtgccccctctcccctcctagtgctgagcaaagcagtggggcagggggctatgcaggtcggtggcagatgtctttgctcctgggtggtcactaattggtccatttagctgcttgagtctgttctcctgttgggtattcagtagactggcaacacctccctactcacatgggtaaggatacgggcctgcgaggatgtgtgtcagttgttttgccccccatcctgatggggaaccatccagacaggattcagcccccagatattaaccctgagtaagacctgacaactcccaaccacatgttcatgattctctgatatgtgacccaccaggaaggcgtgtctccagccaaaggccggaaaccttgtacatttcagggcatcacctggccctgatgttgaagtgtacagaagccagaggtgtgaaggcaggatctgcaggccgacctctcttcaccacttcaaaggagagtccaacttgaaatttcactgtctggtttacacttactgcctctcttaccaccatgcctgctggaatgcgagctgcctgcccacccaactcactctgtccatccctcaagactcactcaaaggtgaccttccccacaaagccttactcatctccagttggtggtgacacctcccttctctggactcttggagcacggggtttgtgcccagactttggctgaatgtgttatgtcatgtcacggggtacctggttgctccgccaagctcctggggggggggggctgtgatgcctcctttctcacccttgagtacctaattgccccaccaagtcagcaccctcagtgaatgtttgctacatgaatgaataggtcccatagattggggaggagacgggtggggaccccatgttggatcaatccaagaatctctgtatgggaagtttcaaaaagttgagatcagaagagcttatttaggtcctatccccacctatcattcattcaccattcattcattcattcaacctagcactggttctcccaggcgcaggggatccatcaaataagaaaggcctcccagcagcacaaaacaaacctggcactacccaccagcacacccacctttctagaagggggttatgtctagaaaacagctggaagcaaccctgccatggctggatagagggagggtcaggtgggagctgcccatgtgggccccttcgaggcatcccatggctccccagagcgtggttcagagcccctggcctggtggaggcttcctgagaaggtaacagagccggagaggctgttgcgtttgcaccggtttctctgtcctagggccgagggccttggctggatgagcccaaagctggacttcccagacactaaagcatcatgggcccttcctgagtgtcatttcgcacttgtgattgtgtgttatttttctttatgagggcctgtctgcttacacaaacttcaggacccaacagaatctggatctgccctcgtttgggccatacataaaaccccaggtagaaccatcacccaagtgggacttctcaggaagatcgggcccctctgtgtgggtttcccagagggagcgcccaccttgcacctagcgtgcgctgtgtctacagcagctggcccggctcatccactgggttgggacaggctgtgagaaccctcagggtggcacctgtggtgctcagctggcatccactggggctcagccaccccaatccccagccaggggactccaaggctgcctgacggtggctcgtgtgggcctgaggcctgtggtgggggcctcatggcaccatttcggggcttggcatttgctgagaggttttccatcatttattaatgagcgttggcagcggtcctgtgaattaaggctcagttggagacgaagctctgagtggctgggtaggcagggccactggctcgcagggctgtgtcatcactggtgctggaagaggctttgctcctgccactgaggccattccctatggccacaccccaaagaagagcttcatcttcccagaggagagttcatacatctgggggcagaagactgcttcaccctctagctggggccaggcttggacaactcacaatctcctccattgccaggtcaccagggcactcccacgcctgttcttgcacacacaagggggctcacccagggacaaaagtgcttaaaaagtaaccatgtgagatgatagattcttttttttgagatggagtcttgctctgtcacccaagctggagtgcagtggcgcgatctcggctcattgcaacctctgcctccagggttcaagcgattctcctgcctcagcctcccaagtagctgggactacaggcacccgccaccatgcccggctaacttttgtattttcagtaaagacggcgtttcaccagacggcgtttcatcatattggccaggctggtctcaaactcctgacctcgtgatccacccacctcagcctcccaaagtgctgggattacaggcgtgagccatcacacccggccaatgagattctttaacttgcttcagggtagtaactactgtactatccatctgtctctatatgtatcccataacatcatgttgtaaccctcaaatatacacataaaaaaaaaaaaacatttttttaagagaccagaggtgcggtggctcacagctataatttcagcactttgggaggccgaggtgagagctttacttgaagccacaagttcaagaccagcctgggcaacatggtgaaaccctgtctctactaaaaatagaaaattagcccagtgtggagcatgcctatagtattagctactcaggaggctgaggtgagaggattgcttgagcccaggaatttgaggctgcagtgaggtatgatcaagccactgcactccagcctgggtgacagagcgagaccctatttccaaaaaaaaaaaaaaaaaactgcgcctccgctactagcagacacgcatggaaaaggtgcctcagcacaccgtgtgtgtcaggacctcgcgtgtttgccttgccctcaccctgggagatagatcttgtcattatcctggctattcagagcaggaaggtgcggcacagagggattaagcaagcagcccatgctgctgtcagccagaatgccaccctggccccccaggggcccagtcctggtgaccacggagcctgggagctgggtgtcatgcaagtagaaagcatgccctttggaaccagatacaatgatgttcaggtcccggctttctccagttggtcatctcccagaactgccgttttctcctctgtgaaatgggaacagcagtccctatcttctggattttcaggaggattcactgatgtaacagcaacatcaatgtcattgcacctgtacagagttagcactcagcgcctcctccatacgttctcagaggccagtggtagtggagggggagggagtgagaggtcttcccaggcagggtggtgaaggggggaatgggggcattggtaggaggaggactggagccattcgcccccttgaatatccggaaatctatggctgtgggatgcagctggagagaactgctttgcaaattaccttgcaaagaaagatccatctcagatctttctttttctttaacaagtttccccccgggccaatttcaaatcaagttcaatctggtatctaacagtgaaaagctggttactcagagtcattagatgtagaatattcaggcctccgtggaggtggccctggcgccctcacgccactgccccgggtcgtggcaccgtgataaacttcattttccagctgttatttgcacctctggaaatgggtgtctctggcttctgtccattgagagggggtttctgctggagaactgaaggatgtgctattcctatgtctggatccagacctcgactgggagggaaaatggcttaatgaataatgaaagctttgtgatcacacggcagcctctcatgaagcctgaggaaggtcgggctcttcagccccagctaagcaaaagggaggcactggaagggcagaatggaaccttgcagggttggaggcctcatgagtccaggcctggtttgccagcatcttctcggagtaggccagcatttctgaaatatcaggactacaggaatttatgacagtgtgggttgtgttaaaaatgggatctaggccgggcgcaggggctcacccctgtaatctcagcactttgggaggccaaggcaggcagatcatgaggtcaggagttcgagaccagcctgaccaagatggtgaaaccccgtctctactaaaaatacaaaaattagctgggtgtgatggtgggcacctgtaatcctagctactcgggaggctgaggcaggagaattgcttgaacccaggaggcagaggttgcagtgagccaagatcgtgccactgcactccggcctgggtgacagagcaagactccatcttgaaaaaaaaatgggatctatagagacctctaggtttttccatttttccttattgccatcagttcaacctatttgtgagggggtgatttttactttgattttggaactgagtgacatgaaaccagtctgacatctggttccactgaatcccaaaccctggttttgagtgtggcccgttggattcgcctctaggacattaatatttatcacattacaatcaagccatgcttccaggagcgactggttgacttaggaggttgatgacaagcagctcattccagtggcatcttgtggatggggcaccgcatgctctgccaatgcctctctgctccgtggttgggcattctgatggcattcctgggtatcttactcgctagtggtaaagagggcagaaggcagagtggatttttttttctgccttttgcacgcagacacagagccagggagccaggagagagcagtgcctcccctggcctcctagatcctgagtccctcagagccctctttggagaaagaacatcagtccgattctttttttttttttttttttagacagggtctcgctctgtcacccaggctggagtgcagtggtgtgatctcggctcactgcaacctccgcctcccaggttcaaccaattctcccacctcggcctccccagtagctggaactacaggggcacgccatgacgctcagccaatttttgtattttttggtagagacagggtttcaccatgttggccaggctggtctcaaactcctgacctcaggtgatctgcctgcctcggcctcccaaagtgctgggattatgggcatgagccagcgtgcccagcccattagtgcaattcaaccaacatgaatcgagcagagactaaatagaaggtttggtttaaagacaagtcagtctcagatccagacccctggctcacggggagacacaatttagaaataatgcaggaggttacaatgacagggatgtgtacagaccattacgagaatgcaaaagagaagagggggacaggtccctgagggcttcttagaaggggcagcgcctgccctgatgacttctgagagtttataaggggacgagggcaggacaaagggaacagcccaagctagaagatggttcgaaacagcatgagctccctgcggagctcagggttattggagggtggggccagcaacaggactcagggtcagcaggaaccagctgtgatggctggcatgaccaaactctatgctgtgggaggtggaaggtcagtgatggtgctgtggtcaaagtcctatgtcaccagattgtcctggcaggtggttttgagggaagcagcaacagggataccagtaaaaaggaagagttatgcaaacccaaactagggcagggcagtgtggatggataagaggggtggatttgaggcatcaaggatgtggaattccaaggtcggctgatggatgaaatacaggccggatgaggaagagggaagagtcaagacgccctccagtgaggacccccagagggtgggagcaagaaggcaatgagagtagatggagggttacaaagggcaggatgacaccttagtttgagccatgctgagccctgtggcccctgttggacttctaggtggagatgtccccggggatgggatgcctgagtctgaggaattgcagtgcaaagagaatggttaaaaccaggcagggtgtagtggctcatacctataatcccagcacttttggaggctgaggcgggcagatcacttgaggtcaggagttcgagaccagcctggccaatgtggggaaaccccatctctactaaaaatacaaaaattagctgggcgtggtagcacacggctgtaatcccagctatgcaggaagctgaggcaggaggatcgcttgagcctgggaggtggaggttgcagtgagccaagagtacgccactgccctccagcctgggcaatgggagtgagaccctgtcaaaaacaaacaaacaaacaaacaaaaaacccacacctgtgcagaggtcaccaacaggagcatgagaatggaaattgaggacagaggagaagctgcacacccctgagaaggaagggaaggaggaggagatcctgagagagactggaaaggaccagtcagggagtgattaggagggcgtgagagagaaaggccacaggaaccaggaaagggaccacatgtgagaagaactgcaaagctcaaggatgttggactgtttgccttgcaatgtcagggttcaggacacgtcagggctgttctggatagagtggcattggaggaagactccatctatgccgcaaatgttgaggcccccaatctgaagcagagttccccacagtgaggcctcagacatcctgcagaccactggagatcttttttatttttaaagagatggagtcttgctctgtcccccaggctgaagtgcagtggtgcagtcatggctcactgcagcctccaactctgggcttaggtgatcctcctgccttagcctcctgagtagctgagactacaggtgcacaccaccatgcctaattttttaaatttgctttttgtagagatggggtctcactcaaactcctgaactcaagcaatcctcctgcctcaacctcccaaagtgctggaattgcaccgcacccatccctgggatacttatttaacgtgagcactcctgagcctcagactgaaaactgctagttgagggcgctggcctgaagccaagttccccaccttcaggaggtgcatccactgccctaagtgttccccgctcaccctcccaagcccccaggcaggcagctccttgtcagtgcctggctgagctcacccagggccagaccctgggccttgggcacgctctggggctgcccattcatgccctgcctcttgctcagtttccaagtctgtttcatttgggaacaatctgcatgccctgcttcctcacccccaccctgccttctcacatgagcccctttccaaacagacacaccagttaactggagcatgggtgcctagcctaggacagaagctggtgaaggggagatgctcctgagatggtccgggagctcaaagaacatcccaccatttgggctaggcctccctcagctcctgaattgccagctggtgcctgcttgtatttcttcatgtagtttgagaggtggtggggcagagtggtttaggctctcaggctctgaaggatgatggcttgggttctagtcccagccctgcactagatgggcaatcctgggcaactcactgaacctctcaggacctcagtttcttcatctgtaaaatggagtggctgacaatggcagcacctgcatgagagggttgcagtgaggactgaatgagttagaatatgaagtacatagaacggcgatgacctcaacaagtattagctgctattactgtaatagttggcagtagagttggtggtggtggtggtggtggtggtcattgtggtagttagcatgggaatagctccctgaccccagggcaccgcccccacagacttcggtcctgtgttctgtatccatctcagaagactggtgtattagtccgtttttacactgctgtaaataaatgcctgagactgggcaatttataaggaaagaggcttaattaactcatagttccacatggctgaggaggcctcaggaagcttacagtcacagcggaaggcaaaggggaagcaggcaccttcttcacaaggcggcaggagacagcgagcgaagagggaacttccaagcacttataaaaccatcagatctcgtgagaactcactcactatcaggagaacaccacggggggaaactgcccccatgatccaatcacctccctccttcaacacatggggattacaggtccccccatcaatacctggggattacagctccctccattgacacgtgggaatacaatccgagatgagatttgggtggggacacagggtcaaaccatatcaactggcaaaagccagagcaactgtgatctattaggatagatgaggctccttgtccgggctgtctgagtgcgcggcctcccgagggaagggctttatttagacgaattagagagagagccaacgcctcctccccaactggctttcagctcgtccctggcatggggatggtgggtaatagatgaagaagccacccagagcatttagatgaaattagtggtgtccaaatctcgattgccctcctaatcaggtgatgaatgtggctccccactgcctatttccacctggcttccacgcagccttccccaggctctctctgcaagcagaatcgctgcattcaggactctcctctctttccttgtgtcgtttacagcatttctcttgcttgatggtggggagctggagtatagcttcccattaacttttatccttcccataaacagcctgcttaactcacgatgactgttgttccactctgttcccagggtttgctccgtctccctcccagccagcctgttctcactgtgtcccagcccaccaagccccacgcctgggctgtcctgtgcctgtggaaggagggaagctggattttacattttatttactgttttttttttttaaatgcaagcaaaagcctcaagccttagctccaaaactccaggaggaagctgaggctgagtgatctgtgcctgggatttcaggagcctggagccaggagagggggcaagggtgcagggcgcctgctctgggacatggatcctgccatgtgggcatggtctctgggactgaccggaggagggagagacacaggaggacaagtgagggccagtggccaaggtccctaggccctgagtgaagtagtgcagggaaggccactttgggagggtgctagtgtccctaagccaggactgctttcgggacggggggagggatgtttagtctgaagatggacagcgatgggggcacaagttatccttggggatcctccctttctgctccaagtcagcagaagaccttgagtaagactcttttcccagagcctggattctgactggcctccctgcctccactctgtcctccatcctggaggagaacagaccttcctaaaaagcaaatcttgtatatcagatggttagcttcacaccctgatatggtttggctgtgtccccacccaaatctcatcttgaattgtagctcctgtaatccccatgtgtcatgggagggacctggggggaggtaattgaatcatgggggtgggttattcctgttctggtctcgtggtagtgaataagtctcacgagatcaatggttttataaagggcagttcccctgcacacactctcttgcctgctgccatgtaagatgtgcctttgctcctccttcaccttctaccatgattgtgagggctcccggccacttggaactgtgagtccattaaacctctttttctttataaattacccagtctggggtatgcctttattagcagcatgagaacagactaatacacacccccacatggctccctccagctcccaggcccctgaggccctgccacccctgtcccctccccctggttctctaattcaagccccaccagcctccttttgccgcctcagacaggctctgacccctctgggcctctgtctgccgtagccgctgcatcttaccttgctaatttttgctcctccttcaaggcgcagctgtactgtgggttcctctgagtagcctccctgacccgcttacaggctatcccaggccccctcatgctactcaaaggcatggacgggatgactctggcaccttcaccaccatagccagggcctagcatggtgcctggcacccagcaacctcttaatgtgtcagcgctgatttgaattcagggttctactagacgaccaagtctgcagctgctcttccaggacttcaggggccctcatgggggagacgaactagacatttctttgtgattccataaggaatggaaggtacatggtcccaacatggcaaagctcttcctggaaagccaccagtgggcaggacgcaggcaggatgttgggtgccatggggcttgggatgcagggccatggacaccaggtgtgactgattagcccaggagctctgaggccttgcctaagcccatgatctggcggctcctcaccaagtgaccaagaagcactagggtgctggcaagtgatggagaattctaacctggtgctccagaccacaggtatgggagtgtattcatccattttcatactgctatgaagaaatacctgagacttggcaatgtatagagaaaaagaggtttaatggactcacagttccacgtggctggagaggcctcatgatcatagcagaaggcaaaggaggaacaaaggcacgtcttacatggcagcaggcaagagagcgtgtgcaggggaattgctctttataaaaccatcagatctaatagacttattcactatcacgagaacagcatgggaaagacccgcccccatgattcaattacttcccactgggtccctcccatgagatgtggggattatgggagctacaattcaagatgagatttgcgtggggacatagccaaaccatatcagggaggtggtgagagggatcttaaaaactgggttggaacttggtatctggctgccctggaagaactgttctcagccctggaggtactccagaaatgcatgtgtgctccctcatcctggcctggttgccagaaagcactggtgacctggcagacctggcaggtgtgtgccctcccagacactggctctctccacctctcatctctctctttctctctctctctctctctctctctctccatcctcaaatagaatagggaggcagggaatcatagcagtgacagcactagttgtaggatcagacagaagcaggtgagagaatcctggctgtgctaccttgggcaagttacttgccctctctgaaccttggctttctcatctgtaaaatgggtgtatagaagctcccccttcataagttgtttttgaagcttaatgagtaaatggaaagagcttagcacatgctttgcagggaatatagttttcaaccaaagccaacacttattagtccattagtcatgaggctcagggaaaaacagggttactttgctgggccttctaagagtcaggggagctctgcttcttttggaagacacagtattatgggtatatgtggacaaggaagagtctgtgtcagtcctgatagggggcaaacctggcctgctcacttctgacaataagaccagctgactctttgttattagaacagggctgattataacaacagcaaacatgttttaagtacataccatgggacaggcacagtgacatttaaaaaatgcatacaattgtttaatcccccaaatcaccctcggtttatccccatttgtgatccccatttcacagatgggaaaaatgaggcacagagaagtgaattaggaccccagatcatacagctaataggtggtaacaaagccagaactcaaacccaagcagaatgacttcagaacgtactgtctctatgctatccagccaaaggatgatcgataggtattttatcaactagtagctcctgaatggagcactgtgttgaggattcagactgtgatcaggggagaaaagtactgtgattgattagtaatgtctgccatgggctgagaaggggaagactcagttctgtgcaggacatttattcatcaccaaccactgcactattgacatttggagctaaatcattatttgttggggcagggtagggagtcatcctgtgcattgtagaatgtttagcacatccctggtcacgtgttgccagtagcacttcgccctgcaaccccaagttgtgacaatcacaactgtctccagcctttgtcaaatgtcacctgggaggcaaaatcaccccctgtagagaaccttgcactagagcaggcaatggacagggggtaacagagctctaaacttgaagtcaggtgaccaacagtcaaagcttggctatgccaccaatcagcttatcaccatggaaatggcccttcacctctccaggcagcaaattcttaatatgtgaagtgagtggggtgaagtggatgatcccaagggtcccttctagaagtttatgattatctactatgatgctccctctcttgcccagccccttcaattaaaactctcaggttattggagcataacttcccagagatctgcagaggcaaaccaacggaaaagctgaaatctgcagagagctgtttcgccctttacagctccctagttgttcctcattaaaaaagaaagaaagaaatgaagaaagaaacaacaacaacaacaacccttagtactgaggtttcatccaagcagcagttatccagtagatgcaaggagaaaaatcacagagacaataactgaatacccattcccctgtgttaggagagaaaaggagcggttggttggggaaatctctccggctccgtttaattatgaatctcggcaggaagcctggaaaatcctggccctctctggaacaaagtgttggaggaggcgtgaggctggtgctgtgggttcttgaagaactcgctgagccagatgagacctcagatgagcaccagccacaagcttccacgcagcgtggggctggtgctcagcatcctcatccccgatacaacatccttcctttccctggagccctgtggtctccagggaacccatgcttattttcgtgtcttagaaagtgttgcagacctgcgctgagacatggagtagagcctgggctttggagccctggaaaaacaggttggaatctccctcccccagtgaaggtacagctggttgggggttagagttctgccggttgcaagcacataaaccaacttctctgacttgatccacaaagaggactttctttttttaagacagggtctcagtcctgtcacctaggctggagtgcagtggtatgatctcagctcactacagcctcgacttcccaggctcagttgattctcccacctcaacctcccacatagctgggactataagcgtgcaccaccatgcccagctaatttgtgtacttttagtagagacaaggtcttgccgtgttgtccgagctggtctcaaactcctgggctcaagcaatccgcccacttcagcctcccaaagtgctgggattacagttgtgaggcaccctgccccgtcccaaagaggaatgtatcggaaggatgtggaagcgtcccaaaggatggaagggagagcttaacagccaagatgaaggaaggaaagaggcaggagcctccatatctggcatcctggaccactcaagaacaccattttaaaaactcccaaaagtcccttagtccatgggtctcctctgtctctgatccaaaatatacacttccaagagaacctctgattggtccagcttgggccagaggtctgcccaggagccttggctgggggcagggccatgtcatgcagggccatgggggaagttctgtgtgaaggactcattcccagagaaaggggctccccagtggtacacccctgaggaccatcagaacctcagtatgggtgtagtgcaaggcagacggcccactccctctccacccaccttctgcccctctgaatcactgcacaggtgctcacaacacaagattcttagagtctaggacccagagtgatgtctccgcttaccacacgagctttgatctccaggttccaggttcacagagagaatttagaggtagaaatggattctctccaagaatcctgcttcctaagggaaccagaatgggctgcagacaggcctcggtccccgagtggattttgtatcagagtccagtgccgtctcccttctgctgatcacaaaggtgacctctctcccaaatcctccactggccccattccaggctgctccattgaaaggaaacaccttttcggaccttgtagttccctggactgctagacacaggtggggtcttggggacagggctcctgccccactgcctggttctacagatgagccgacagaaggaacaatgggcccgagtcactatggaagccattatcttctgttgggtctgaaacagtgcagctcacggcccagcattcctcaggatggctctctccttgtggctggcagaggtgagaggtgaggcaggctgagtccaaggggcccgacattatcccatcaaccacccctccccacctgggagcctctggcagcctcaggaagctgccaacttgaagccagaattgaaatgtgtcccttttcacaaggcactccaccatgaggggcagtgaggaggagagagcttgttcctcgtgggtgagcaggggctgccgtgtcgaggcagccaggctcctctgggactaaaagaggccacccaagggccccagggtgggatccaaaagccctaacaggccagatgatagcagccaggctggggacagaatgacagacattcagagcctggagggtctagagctccgggcatgagccatgagttttccagcttcaggaaagctcccagggcgcctcggctgatggcatgaaatccagtctccttacaggacggttctggctccctccaggactgcagccccacctgcttactcagcctcagtactgtctccgtcacctccccaggcaaggtcccttccagaagctcatgccaaacatgcctctgggcttcgtctcgcctgggccgccatatgccaagtactacttactctgtgtgaaccccagcacctccccaggcttcccagacaccccattcagcacttgtcccttattctttgaaattccacaaacctgctccttgtctcatagtgtcactggctctcttgttctagttactgtgttcgctcacctccccagctaggtcataagctctcccaggcaggatccacggggcctggtgtcaatcaatgaataccaaactaaaagaaagaatgggcaaaggattgagtgggtgaaccttgtccacctcaaaagaaaaacccaaaacagattctagcgtgaccacaaggcacctcaatgactttaagctatcaaagaagaaatgaggctggatgcagtggcttacacctgtaattccaggactttgggaggtcaaggcgggtggatcacttgaggtcaggagttcgagaccagcctggccaatgtagtaaaaccctgtctccactaaaaatacaaaaattagccaggcatggtggccggtgcctatagtcccagctactcaggaggctgaggcatgagaatcgcttgaacccaggaggcagaggttgcagtgagctgagattgcaccactgcactctagcctgggtgacagagcgagactctatctcaaaacaaacaaacaaaaaacaaacccaaacagattctagagggaccacaaggcacctcaatgactctaaactatcaaaaaagtaataagcctgtgtgaatcttttagcagttgccagtgatagtcgtcctcatttgcccaaagaaacttcccaggatctgaatggcaagcatttattatttttagcccctctcttaactctaattggaacagtctagtctaaagacatctccgagaaatgaggagttgaaaaccatatactcacactcatgacatcatcacgatttagccttctcaaggtttcttgaccaacatgggtctcattgggtctcacttgagatatgaaaggttgtaaaaatatttcccccattttctgaatgaggagtggcttccctgacctctactctgcagcctgggccaggcttctcggtgatgtgctgtcggaaactcaggactctttctaagccctttcctcagtcgtcactgaatacctatggaaccagaaagcttcagaagggcagagaccatgtctgtcctgttctcctcttgtattattgattattgctctaacagagatatgcccaaatgtataatgccttaaacatagtaggagttcatttcctgctcatgtaacagtccaaatgggtggccctctcaacggacacctgtgttccacagagtgattcagggacccaggcttccttcatcccatggcaggttgggagggagtggagatggagggccacccccactgctcttgagccttgtccaggagtggctcacgtcacttcagttcacattccattggacaactgggtcacaggccacctcaaactgcaagggaagctgggaaatacagtgtagccgtgtgcaccgtaagaaaaggaaacaggttctagcaagcagacactctgctacatctctgagtccccagcacctcacacacagcaggtgctcaataaatgtaagttcaatgaaggaactgaaggtcacagtggcttacgagggtctcatggagagccactagcaggccaggaagctagggctccctgagaaagcctgaaccagcccagactgcctctccacgcctggagtttcgctcaggaacccatggagaggtttcccaacagcctggcttgctgaagctggaaagaggccagcccgtaggagaccagagtgtgccaattaggaaatcacagttattagggggtttctttggcactcggtgtggaagtggaggaattaagaaggggacctctaagggagaattgcggggagcagggggcagggctgggcaaagagctgaggcatggggaatcaaggagcctcgagtttgtcagcagcagcttggagcactggctggtgggcctgaccggtgcctctgctccaaatcctgggttatgggttaaattgcaccctaccccatccccaccgaaaattcttatgttgaagtcctaaccccagtacttcagaatgtgacctgatttggagacaggctctttacagaggtaatcaagttcaaatgaggccttttgaggccgaggtgggtggatcatttgaggtcaggagttcgacaccagcctggccaacatggtgaaaccccatctctactaaaaataacaaaacttagccaggcatggtggcacatgcctttaatcccagctactcagaaggctaaggcaggagaatcacttgaaccctggaggtggaagttgcagtgagccgagatcgcgccacttcactccagcctgggtgacagggtgagaccctgtctcaaaaagaaaaaaatgaggcctttagagtggggcctaatccagtatgactggggcccttatgaaaaggggaactttggacatagacacatgcacacagagagaatatgatatgaagagaaggcagagatggggttgatgcttctacaagccaaggaacgccagagatcaccagcaaacaccagaagcaaggcagagtcatggaagagctttctccctcacagccctcaggaggaaccaaccccatcaacaccttgatcttgggacttcaagcctgcagaactgtaaggcaataactttctgtcatggaaccccccagtgtatgatacttcgttaaagtaaccccagaaaactaatgcaccctgcctctcagtgctggaatgatcttggccaagtcacttccatcctggcctccagtccctcttctgaaaccacgtccaaggataggagccagtgtctccccaaaccaagaacatcgcttatcattgctctgggctgcatttcttggttttacatctccttgctgctcctatcccatgcagcttcctttaagaagggtacctccctgggccttccaacctgaagtcacgccctcccttaatccattcaggctgctaacaaactacaaaatatagtgtatctgtagtatataacaaaatactataaattgggtggcttacaatacaacagaaatttatttctcacagttctggaggctgcgaagtccaagatcaaggcgccagcagatttggtgtctggtgagggtggcttcctggtttatagacggtgccttcttgctgtgttctcatgtagttgaagggacaaacaagctctccagagtctcttttaaaaggactctaatcacatttgtgagagctccactaatcacctcctaacatcatcacctcagggttaggagttcagcatatgaatttgggggtagaggacacaaatattcagactactgcatccccaccgtggagactgtacaataaactcccatgtcctctgcccaccatgcaagaccccacccccatcccagctccttcttcctctacctcccccatcactgctacccaaccatgccaggacagctgtggtttgggaaccttcacacctttgccccgactgccccctttgtttgcaccagacacagtggtgccttctctgcacacatcagcccttctcaaaaatcctaaccttgctccccagccaagctctgcctttgtccccatgcctaccctccctgactactcgctgtcccagtggtgtggggccctgggttgccatccccgctgcttcagcatctctgcctgctagtgaaggattaacacagcctgaagcatcagccaataccctcagccccagagtctaatcctaaggagtgttggggacatgtgcttccccatcatgctgaagccacacagaacgtcttggagctctgtgttcttctgcctccttggtgtacgaagtaggggcacagactctgaagccaggcagcctgggttcagatcccagttagggcacttagtaacaaagggtgttagcctgtctaccatatagggttagcatgaagattaagttaataaatgtcaggtgttcaaaatagtgcctgatacatcataggtgctaagtacagtaaatatttgctgtcactcttatcatgaggacagagctctttcatgcccccatcacctatcagcccagctaaagtcctgttacccctcagttccccacctcctccatgaagtcccaggcaggtcatttccgggatggtctgcagcctcctggaaacatagagccctccagtctttctaggctgttcccttccttcctgtggaaatggggtggtgtgggagagggccaggtcctgagtagttctgggaaaaccttgaggagaagtagtgatggcagatgattggcaggaggacagagagacacaggcatgctctgagctcctgcagtgtgcccctttctgagacacagacatggtccatttggcccttggaccagggctgttacctgagtacagctaccccctttcacagcatacagtccagggaaacctctccaatttggagtagttgggagatggccactttaaattatggtaaagttcgcattgctggctctctagaacaatacatgttgtttgattattttgcagttcctaagttaattcaaccaaaattgcctggacgcttggcccagatgtggtcttcaccctcaccgccttctctggtctgtgtggcctcagtaggtgtttcttgctggtccctggactgagtctggggttctttccctctcctcttctagtgttgcctggagagagtggggatcatggaggatggtctgaaatcacgtatgtgagcagcccccgcaggggtgtgtgttcctggaagtggactccacaccttcatcatctcagctttgagctcagccacaattttaggacaagagtccacagcctaacacgcctcagaccccttcccctgtcttcactcatggcgccacctaaaatgatgctgatattcatttattttatcttcttgtgtcaacagcccgccttgccctgctccaccagaatgagagctccgtgagggccaggactccgtcttactcagactggcagccccagcacttagaacattgctatgggctctgtaaaatgctcttgaggaatgaatgaatgaatgaatgaatgaatgagtgagatgagtaaacagtgacaatactgtcgagcaatgaatgattgagtgatgagcaaacggtgaaagtctgttgagaatgaatgagtgatgcatgagtgaacaggaaaggtcccactcagtatcatcttctacttgccctctttccttctctttcctttttatgcacagtcgtcccctcctagatcctaaaggggagttgtgctgctgggccgccttctccctggcttccacagccccagccaatccgaggctgccttctttcccagggcctggagactcccaataccccgctcttcatcacctgacagctgtttccttgaagctaacccagtgcacctggtggctatctggtttctcttccttttctgtcttggggagaaaaaccagctgggcctcacctcctgtagagccccagccctgcttctatagaggattcttggaaaggctgcattggggcggtgtgggaggagcactggacaaggaatcaagaggctggattccagggtgccctgtgcaggggaccaggtgttccctgagcctcactttcctcttctgtcaaatggagcagagaagactttgttttacattagggtagaatgcctgatcgttctgctgtgagccttgtggaagcaggtctttcagcatctctaagcctctttctccatcttcaaaggagcattattgcagagatgaaatgggctgaagcatgcaacacgcccagccttcatcatagcttgagcccagggctggcatgcagggggtgtatcttgggtggccatcctagggaccaggcatcggggaggggagagccaatgcaaggatgtcctgggctgatgatcacctggcttggtcctgctgggacccaccccttcagaagcagtgtagaaaggacttcagaactgcccaccaagggacagcgtttggggacctttatccaccagctcccatcccgtcctccactgttcaaaggtttcccccagggtggttaatccctcaaacttccagttgcacgtgcgcgagtgcagagtcgttccctcaggcaacctactcagtgctgtgggcagaaagcaagaagtaactggtgcagctgaattgaggtgtcagcaggctccacctgcacagagctggtcgctcgcggcagccatgtgtggctggggtaaaagataggccaagaggtacgaggtggacagaagggtgaccatacaccctcagtaggtgcctgtggcagctgtgaatgtgaggatcaaatgaggtcatgcttttgaaaatgcattgcaaatgacaaaggattatatgaatgagcaccatcagcaagttgccctctgacatgcttttctccaggattcccttaatgacgatggcctcaggtggcccatatggaggcttagtgcccctgaaatggctcacagggtgaccagctcaccccgtttgcctggactcttccaatgttcctatgtccctggaacccatcgggtcctgggggttggccattcaactgtacttggggatatgaccccaaggcatgaccttcacggaggtcatggaaggagaggctcaaatgctgcccacacaccctctggcccccagggttcacacctcgcttcccagctcccatgtccaagtgcatctgctgtcatttcagacacaccacctcattttcactcggagtcaaagaatctggtctcttttcttagttttattggttcattttcagatactgtaggaaattcagaaaacacagaggaatgtaaagaagaaaaatgtaacttgctcattactctatcgctcagaaataaaacactggacacatgtggggatatttctttccagatgcttcctgtgcccatagaaatatacttttaatgaggccaggtgtgatggctcacacccgtaaacccagcactttgggaggccgaggcgggtggatcacctgaggtcaggaattcaagaccaacctggccaacatgatgaaaccccatctctaccaaaaatacaaaaattagccaggcttagtggcatgcacctgtagtcccggctacttgggaggctgaggcaggagaattggttgaacccgggaggtggaggtcgcagtgagccgagtccatgccattgcgctccaacctgggtcacagagtgagacttgtctcaaaaaaaaaaaagaaatattcttttaatgaaagtgtcccctgatatgtgcagatgaagggatatacacgtgtgcagacgagcctgtacctgctcatgaaggggcatgcacacctgtgcacacaccccgtgcctgttatttacaaaatagtcatagaatcttcaagcaggaccgtctccctctggtccaattcctaggttttctagatgaagaagtaacttgcctgaggccgagtgactaacaaagtctcccgctagtggtctcctggccctcaggaaggtgagggccacagtgtctctgggagcacagcccagcgacccctgtctccacctcgcgacctcagcattcctgcagcccagccagccaggatctcacaattagccaccctaaatatcacttaatagatagcacagcaaatggcccatgtatggagagcgaacacatgtgaagtggattgaaaatggctttctttcttactccttgcatcagctattcattttctccttactaaatgccctaggccagcgctaacgaaattaaatttgacagggataaatgtgaagtccttagcgccaagcattctactccacaaaaacagattcgggggaggtgaggcaacttttgtgaaaaaaaaatcctaggagaccgagtcaacagcgatacccagtcccattaacagaagcatggagtccagagaagagaagaaagtgccaatgtggtttgagctggtcagacccagcctgaacgttgggtttggtggtggagctgtgcctccaggcaccaagagttgggaacaagcccagaggagggagccagggagaaggcacttgaaaccgccagtaaaaaaatggtagctgggcacagtggctcacacctgtaatcccagcactttgggaggccacggtgggtggattgcttgaggtcagaagttcaagaccagcctaaccaacatggtgaaatccagtctctactaaaaatacaaaaattagccagtggtggtggtgcgtgcctgtagtctcagttacttgggaggctgaggcatgagaattgcttgaacccaggaagcagaggttgcagtgagccgagatcgcaccactgcactccagcctgggcgacagagcgagactccatctccaaaaacaaaaaaaaaaaaaaaagaaagaaagaaagaaatagctgaaggtgttgacttaggatgtttaggggaaatatcccagattcttggctctagggacagagaacaatctcattcactctccacggggctgaagacagcttgtgcccttctccaccgcctcgttagtaatagctggaaacaacaggtgtccctccgtgggtgaaagatgaaacaaacaatgcagcatccatgccgcagaattccgctcagaaataacacggagcaaactaccgatacgcatgacagcttggatgaatccttagggggttaggctgagtgagaacagccggtccccaaagcttacatgctgtatcattccatttgtaggagagtctcaaaatgacaaaactattgacatggagaacatgttcctggatgccttgggtcagggaggggacgggcaggagggcttgggtggggctgtgcgagggcagcgtggggactccttgcagtgaccaagtgttctgtatcctgactgtcaatgtcagcgtcctggttgtgatattgcactacagttttgcacgatgttgtcatggggagaagctgagtataaagggtaggtgttccagtattatttcttacaactgcatgtgactctacaattatttcaagacaagtgtaattttttttaagatgggcagaaccccacgcgtatatacgtggaagggtgtgcccacgaaggagcatctgagaagacacacggtggacttagcagcctgccgctgcagagcaaatcgggaaagagggactcctttttctttttcaacctcttattgccactggtcccaccatgcatgtgtgacttggtgattttgcttagacctatgaagtagcccaaaaaaaggtgtgtggggaaggggaggaacagcaaagagcttggtctcacccacccacagctggcaaaatgcctactccaggtctccaggaacattctgagcctgccatgggagagccaggagtgagaggggatgtagccggcccactctggcctttgtgtccccaccccaccaccctgaggccagcctgtcttggagttccttcctcttgctcacaaaccctcatggttctccaccaattcagccactcatgaaggagcgagggtgggtcatttctagatccaacagcagcaaccccccaactctgagccaccaccatgggcccggaatcaccctaagtgcctttcaagtatgacgtggtgtaattctcctaagatccccaggatataagggctgtggctctgcccattctacagatgaggagaccgaggagttaataactacgttgttcatgctggatcctatgcagaggacactcctagcatcacctctgagaccctccctctgcctccccaccatcctgccccccaccgctggcccccagggcccatggaccttcaggaatcagggttgtcactgaacactccagctccttggaggcagcagctgaaggggcccaatggaggaaagagcttggggacggcagctggtaatcagcttcttggtgaccaggtagaagggcagcgtgctcccagctcgccagggacctctcctggttggaagcatgagaggtggacgtgcacccggaccctgccgccaggactgtgctcctgactgactgaggcaacagggggcgcttgcagccgctgcaggaaaggaattggccccaggtggaaactgctcctttggtgtcaagatgagcttgtggctcccaggctgcaggagcaggggggctgacccgggggaaggggttgtctgacatggataggacgtggcggcaacaccctgtgcccctggcaaccaatgtccagttctgtggtggccattctcagacttcagggtagcagaggactaggagagcagggcagaagattctggaagggaggattggcctgtcctacattacgaagctacccaggggtctggccccccaccccatgagagccacttctcagagtagggaggaagaaaccaagcagatgatggtctcagcccttctggaagtttctcttgctccatcctctcttccctcaaccgcattgagtgaggggattggaatctgcaccagctgtgtacctgaggaaggagtcaccataactgtggttttttgagtttttttgagacagggtctggctctgttgcccaggctggagtgcagtgatgtggtctcagctcaccgcaacctccacctcccaggctcaagtgatcctcccacctcagcctcccgagtagctgggattacaagtgcaccccaccacattcagctaatttttgtacttttaggagaaatggggtttcaccatattgcccaggctggtctcgaactcctgggcttaagcgatccgccctcctcagcctcccaaagtggtgggattacaggcgtgagccactgcatccggccataactatggtttaagagagggaaagacacagacagacagacttcaaccccacccttgccttcacatgtcttgcttctctgcctggaaagccccctgtgccccattcccagtgggcaaattcgttgttgttgttgttgttgttgttgtttgttgttgtttgagacagagtcttgctctgtcgccaggctggagtgcagtggcgcgatcttggctcactgcaacctctgcctcccgggttcaagcaattcttgtgcctcagcctcccgagtagctgggactataggcattcgccaccacggccagctaatttttgtatttttagtagggacggggtttcaccatgttggccaggatggtctcgatcttctgacctcctgatccacccacctcggcctcctaaaatgctgggattacaggcatgagccaccgtgcccagcctgttttttatttttttcaagatgcggctaagagtcccttgggtagagggatccgacctcctgcttgccccgggcagctctgcatggcacctcttgtctcaatggttattcatgccgggtcccattactctcacgtgcgtccacccttggaccataactagggtcacctttggggcatatctctcccggtgtagccattctctgtgtgtctctcccgtgcccccaccagactggaacgctggagcctgcctttcttctctgtctgtccccaggacctgcacagaggctcacacacatggcaaccgtgtctggagtgaacggatgagtgaacccagacagcatttacagtgttcttttcctctcgttccttccagggatctataaagggcactgcttccggatcaatcacttcccagaggacaatgactacgaccacgacagctcggagtacctcctccgtgagtgtcaggaggcctggactctctttctgtggggaggcggaagggtgggggaaggcggccggaggaaagagagacactgggcatggagagggtgattgtcttgggatggtccactcactgtcttacttattcagacattgtgagtttggaggatggagttttgctcatcactgccatgacatactgggtatctcaatgcggttatttggctgagaggcctgtaccctggggagatgggcctgtgccctggggagagagacctgagcagaaagcctgctgggcatggcaggcttcaaagttactgactggctggagctggggctggagcaaggaaggttaaagatataggctctgcccaggctgggcctccctgaggggtgtggctctctaagcacaatggggcctccccaccctctcctgcatactctcttccattccagtcttgaaaaatcagatacagtcacacaccaagacagcctcttggggtgctgggagacccaggggagaaggcgaggaaggtgccagggagcagcctctgatatatggtcctgaagtcttttcagcaccgcctctgcccatgggagcccccacctgctcctgggtccagtgactgcatgtggcccgcagactgaagcccggaagtcacagcacaagctcaatcccaaatgacaaacccagcccccacactaagtccagatctcatccctgggcctgtgaatacctccctggcagcagccagggaggagcctgcaaatagaaaaattgcaccattttggagtcattttcccctttcacattaaccaagacacacaaagagcagctcacagcagcacccctggggctcagacccagccttgttgatggagaatcaataccagcatcctcagagagagcacaattcactctgcacctgcttatggatcgttttttctaagagaaaggattttgattctgagtcatctggtgaaatagaacagcacgcggttcccatagagcctggggcagtgtcaggctgctgcgaccaggcccagaacatgaactaatttggccaccgctctgcctcccatccttcctccctcacctcctcctcctcctgtctatgctctcgttctgcttaccgggggcccacactgaaccaagcaaatgagatttccacagggccgccagagatggttgtgcaggttgcacactgcacaactcaagggatgtcacctgcataaattatggtatgaacatccttccagttgtacagtgcacgtctgcacaaccagccacagaggcccttggtgctcagcctagctgggatggctcagttgaaaatcagccccaactcagaatctgcctttctctgcccaatccagggcaatcaggtggttcttaaagctctgggggcagatgtgcccatggcccaaccctgggactgtaaggaaagaggcattagagaaacaaaccgttccctctccatttcccactggagctcccctgaggttatgggcgttggtgctggttgttctttactcgcctgtctctgtcccattcatggtcccggagtgctggggtctctttatggattggcttcaagatgcagaagcccagaggtcaccccacatggcttcccaatctcccagcaggaagtagatgttacagtcaaacaggatgaatgaaggatgtttacggaaggactatttacaaaggtgcgggtgaggttaagggaaacccacaagggctggagagcaccccggggccagcaatagccgggagcccttaccctcctcagcctggataggtgaggggggcaggcatgggagcctggaggagggagcagtagggacagggctgcctggcaggagctgcggctgttgggaagcaatgccaccccttcacctgcagctgggcagaactccctcgccgagacccttctccaaaagccagaggcggaagcccgaggatttggtccacacagtcagcttggcccagggcaggatggagtgaggatctggaagagcaagaaaaacaaaaacgagtgagctgttccagctcctctggggagggcgcaaggcggggagggctgcagagtgattttcccagatataatgatggtgacagcacaaccgcaattagagctcattggggaaggccatgttctccttaagcgtacgctgtggggaaagcagccaggttcattaacaagctcagagatgcacatggaagagacagcttgacggctttcgggcctgtggtctctgctgctggcagaagtcagggcggggtggggctgaactgacttcccaacagggaggtgtttttccactcggtggctgcagaaacagggatatctggccctaaaaccaagctctgcatgtgtctttgatcatccttttatctccagagtgcaggtgcctgtgagcttgaagccggaggggctgagcaactttcagagacaggccaaggtcatgatcaccacagacaactggcatgtgtttccagggccaccctgatttctaatattttgtcttctggtccctgtccagactatggctcctcaaaatatgtagaagcacaggagggaggtctctggcggctgatatttgcaagaagtgagggttcatgagagttcgtttattcattcatttaacaagttattgcagccagatgcagtggttcactcctgtaatcccagcactttgagaggccaaggcgtgaagatcgcttgaggttaggagttccagcttggtcaacatagtgagacctcatctttacaaaaaataaaaataaattagccagaagtgatggcacatgcctccagtcccagctattcaggaggctaaggtgggcggatcatttgagccgaggaagttgaggctgcagtgagccacgatcgtgccactgcactccagcctgcatgacagagcaagaccccatcttaaaaaaaaaaaaaaagttattgtgggcctgctatgtaccaggcactgtattagacatgtggagtacagcagcaaagaaaacagggctctgcctccgggtggagaatgggtgttttggagaaggcagcagaagcttccatggtggggctgcctgcaggatgcctgtttcaggccagctcatctgcgtgggcgtggagcaccaaccctggtagatccaaggctgcgctgctcccacccagtctttgacaattcaagaaggaactccgccccgagccatgctttctgaagccttccacagaagctgggcttgtgttgtttgttgcagagccccctgaaggcctctgagctcttacgatgtcactgctgatttgcaggttcacagcccaagatttgagggggtcaccaccccacatcctgcctaccttctcttccacaggctctgctggtcccagggcttcctgcccaccttgccctgggcctggtgcccctctccaagtctgcatttccagttaggtggataacttctgtgccaggccgcagggggctggtgtcagggctgctgggagtccacagtgtgcccgggggtgagttagaaggaagtgtcttgtctcctggcagatgcagatcctctgccagggcttgatatggccagcagggcacgggctggacttcagcctcactcatccctccaccccttagccacctgcgctgtgcccgacctgcaccactgtccgtggcaatcccagctggcatctgcacatccacagctcaggaatgagtctgtgtggcaaggcataggtgcttgtgtgacttatctgggcaggatggatggctctgagccaagcctgggcatccagtgatcttagagcaactgggctttttttttttttttttaagacggagtctcgctctgctgcctaggctggagtgcagtggcgcgatcttggctcactgtaacctctgctcccgggttcaggcgattcttgtgcctcagcctcctgaatcgctgggattacaggcactcgccactatacccagctgatttttctatttttagtggagactgggtttcacaatgttggccaggctggtctcaaactcctgacctcaagtgatccactcacctcgggctcccaaagtgctggatggacttccttctttcggattcctctgacctgtctgcagaacgagggcattgaggggatgactgacctcaacttttctggccagcacagctcagaggcacatttcagaaacacaggaaacttcatcccagagcccgctgctgccagaaggcagagaggaatcggagaggaggaggcaccggagagaagaactgcatttaatgcccccagacaatctcctctctgtgaagcagggacacacactgatgcgttcacaaaaaaggagacaaaccctgccttcagaggagaggctgacagccctgaaacccgctcagctggctggggagggtggcgcctgccagtgcggcccgactcactgtcccctgcgggggccaccaagggtccatgcagccgagatttctacggggctgggagacagcaggtgcttgggaaaggccgagctctgggctttcctttcccaagccttgcttccctccctctcgccttcctcccagcccagatgctaagggaggggcaccctaagcccctactgggtgcttgacattttctcacagtaaccctccaatggggcatgttcatctcccaaggccattgtaacaaatgatcaaaactgcgtgacctgcaacagaaattcactgtcatggtgtggaagccagaagcccgaagtcaaggtgttgggggaccctgctttctctgaaggctctaggagaggaccattcctctcccagctttggaggtggttggcactccttggcccatggcagcagcattgggtctctgcctccgtcttcacagccccttctcccctgtgtcttctcctaaggttcttataaggatgctcgtcgttggatctagggcccaccggattcatcctggatgatctcagcttgagattcttaactgagtcacatctgcaagacctcttctttttttttttttttttttttttgagacagagtctcgctctgtcacccaggctggagtgcagtggcgcgatcttggctcactgcaagctccgcctcccgggttcacgccattctcctgcctcagcctcccaagtagctgggactacaggcactggctacaacgcccggctaattttttgtatttttcctagagataggatttcaccatgctagccagaatggtctcaatctcctgacctcgtgatccacctgcctcagcctcccaaagtgctgggattacaggcgtgagccaccgcgcccagccctttttttttttttaagacagaatgtcactcttgtcgcccaggctggagtgcaatggcgcaatctcagctcactgcaacctccacctctggggttcgagagattctcctgcctcagcttcccaagtagctgggattacaggagcccaccaccatgcccggctaattttttttgtttgtttttagtagatacggggtttcaccatgttggccaggctggtctcgaactcctgacctcaggtgatctgcctgccttggcctcccaaagtgctgggattacaggcatgagccactgcgcctggccaaggccctttttccaaataagatcaattacaggtcctaagggttaggacacaggtatattctagggaggctgcaattcaactccctacaggtagatgttactattcccaagttataaaaggggactgaggtggtcaccaaagtcagctgtccccggtcagctaatcagtggcagagcgaggttagtcagtggcagagccctggtgtcagggctacaaagttggttctgtggacactgtgggtcacgagcatccctctcggcccagccacacctcccctgcgacttcaggccggttttgaggtcccacatccttgtctatcacctaggggctgatgatgatgatgatgatcaaggtatagaatggccaggcccagtgctatgcaccttacatgtacaaaaccaagcacatgtgtaggacactggtgctatgaggaacctcattccacagatgggaagctgagttttggagagggaaagtgacttggccaaggctacacagccagcatgccacagcagggcccacgcccagacccacctaatgccgatgcgtgtgctctcaaccactgaccagggccaccctttgtggacactgcttcccagccttccaggggcttcacggagactgcgttcatgcaagggcttagggggctgtgcagtgccacaaaaatgtgatgcggtttgttgctttcatggctgttactctggtctccctggtgcccactcccagggagagactaaacaagaggtagacagatgtgactccagggtgaagggcaggcccggagcccccacttgcatctgatccaatggccctgagcctccccaggcactggcccacctcgagtctccaggtcctgatgggaatctcaaatcctggggaagggcctggagctgcaaggttcctgggagacatacgcagccatgcccgggagggcacctgatctcactgccctctgctttgtgccccccacctccccggccaggcatcgtgcgagcctccagcgtcttccccatcctcagcaccatcctgctcctgctgggtggcctgtgcatcggtgctggcaggatctacagccgcaagaacaacatcgtcctcagtgccggcatcctcttcgtggctgcaggtgagccgcccgcccgggctggtgctgggccgggagctggggacacaggagtgcctgtctcgtgtggtccccactgccaggcagtgtgcatcctagaggggaatgcagacataacatcgccacatgcaactgacttgtaaagtcccaatgttcaggactgggggtggatggagaatggggagcagctgccaaacagagcttccttttggggtgacagaaatgttttggatgcttgcacaacattttgaatgcgccaaaagccactggattgtgcccttcaaaagggttacttttatcttgcatgaatttcacctcaaccggaaaataagtccaggtgtgcaaagtggtgggtggggttcagctggcagttttacaagcctgtgacaggagcctggctgggtcaggcggtcagggaggtgcccacgggaatcatgccaaaactcgaaggagttggccaggtaaagacagggcgagggcccggaatgggcatgagtggccgtcttgcagaggaagcagaagtccagggtgccctgggaagagtgagcggggaagctcggcagagcaggcggcccccgcccatcccgactgccccaaccctcctggctacaagaaggcagcagcacctcagagccatgcccgatgtccccggaaagtgccatcggggaatagccacagagctgtgggtgacagtgacatgccaccttggctgaagatgggcaggcctggcgtggtgccgcacacgtgggcctcccagagcacccttgtcctgtcctgcattccctcgccctttctcctggagagggtagatgacttccgttcacatcctgggacccgcagccactgcagccttagaggggctggctccagctctgcagccgccattggggagccaaggtgccgggccccggttctacaccattccagcatctgtttccttccagcgcaataaatagacgtgtgtgtggagtgcgtgcatctgcgagtgatctgtggggcctgtacatgtgtcaggagtgtggtgtgtgtatgtgtttgagaactgtgattgtgtgtgtggtgtatgtgtgtgtttgaggactgtggtgtgtttgtgtgtgtgaagagtgtgggatgtgtgtgtgtatttgaggactgtggtgtgtttgtgtgtgtgaggagtgtggtgtgtttgtgtgtgaggagtgtggtgtgtgtgtttgaggactgtggtgtgtttgtgtgtgtgaagagtgtggtgtgtatatttggggactatggtgtttgtgtgtgcgaggagtgtggtgtgtttgtgcgtgttaagagtgtggtgtgtgtgtgtatttgaggactggtgggtttgtgtgtgtgagcatggtgtgtgtgtatttgaggaatgtggtgtgtgtgtgtatttgaggactggtgggtttgtgtgtgtgagcatggtgtgtgtgtatttgaggaatgtggtgtatgtgtgtgtatttgaggactgtggggtgtgtctgtatttgaggaatgtggtgtatgtgtgtgtatttgaggactgtggggtgtgtatgtatttgaggactgtggtgtgtgtgtgaggactatggtgtgtgtgtgtgtctgaggagtgtggtgtgtgtatttgaggactgtggtgtgtgtgtgtctgagacgtgtagtgtgcgtgtgtgtatttgaggactgtggtgtgtgtgtgtgaggactatggtatatgtgtgtctgaggagtgtgtgttgaggactgtggtgtgtttgtgtgtgtgaggactatggtgtgtgtgaggagtgtggtgtgtgtgtgcacatgtgtgtgtgttgggaagaggagcctgtgttgagggtctcctgggagaagcatgaacctccctcctggacaggtccccccgcccttcccttcttccccccacctcctttctctctctcctgccccagtgcccgccacctgctccttgaagcagtcatttttcaaaaggtgtgagccgtttaggaggtcccggctgtgacccctcaacactgccccagagcgtcctccccacggcagggagagaatactccagtcacatcagaaaccacagtggccatgccagcgctctgtgagcccaaccccaccatccctgctcctgcggaggaggcacacaggcggtccagcagctcaggtggcttccttgaagtcacacgcacagtggcaaagacatgctgtgcccagggctgccagcctccaaagcccttcgaggtgccccctgcagctgcccgtgcccccaggaggagccgtttcaaaggcaggcccagatgcttggtgccaccagagggacttggagcctggacccagagccctagccgaagaaaatgagtccaggcagagaaggtggccgcggctggctgcaaggaagcaatggggaggccagcaaggggacattggcttattccctggcgcatggggcactgatggggactgagcagggcagcaggcactgagtcatgtgtggggcctggcttcaggccaccagccctagcagggaggtctgacaggctcttaaagaactcgaggtggaaaatggtaggtgccacaggagagggacagtttccaaggctgggaaagtcagaagaagacacaagacttctctgggaaactggaattcatggagttgttatttaagaaacccttttccaactcgtgctgaatacagagaggggaagaaaacacaaagctagggaagcagcaagagagagatcagaggggagacaggtgaactagcggtggctcatgcctgtaatcccagcattttgggaggccgaggcaggcggatcactggaggtcaggagttcgagaccagcctggccaacatggtgaaaccctgtctctaccaaaaaatacaaaaattagctgggtttggtggcaggtgcctgtaatcccagctacttgggagtctgaggcacgagaatcacctgaacctgggaggcggaggttgcaatgagctgagatcacgccactgcactccagcctgggcgacagagcaagactctgtctcaaaaaaaataaataaataaaaagcgaactagtagggtaaaaaaaaaccatgttggaaagggttcttacagaacacaacagaagagacaaggagttgaaacccaggactggtgtgctcagggcaggactgctggaccccttagcagaagatattctaacccttccacacagggtgggtgccacagagaatggacagaggacgtggacggtgcagagacaaacacaacacagcactttatgataaaacgcaatgggccgggcacggtggctcacgcctgtaatcccagcactttgggaggctgaggcgggcggatcacaagctcaggagatcgagaccattctggctaacacggtgaaaccccgtctctactaaaaatacaaagaattagctgggcatggtggcgggtgcctgtagtcccagctactcaggaggctgaggcaggagaatggcgtgaacccgggaggcggagcttgcagtgagccaagatcgcgccactgcactccagcctgggggacagagcgagactccgtctcaaaaaagaaaaacaaaaacagaaaaaaaacgcaatggatggtaattgaacttacgtcaggcgccctgtgtgctgggtgctgttgtgagcactttgtatatatcagctcatttaatcctcacaccagcccagtgaggtgtggaccacagttactcccactttacagatgagactgacgcataaggagtgggagtaatttgccaaaagtcacacactggtatttggtagaaccagaactcaaaccccaccagtgtggctctgttcaacctcccttagaataagagagaattggataaacacaacaatggctatttttcacttcccatattggcaaagaaccagaagtctgataatattcatgataggctgttgggacatttgtacccttacagagggcacttagtgactaaatttaaaacactaaatgcaatgtaatatcctgaatccatccagggacagagaaaggacattagtacaaacccagtaaaatccaagtaaaggctgggcgtggtggctcacacctattatcccagcactttgggaggctgaggcaggtggatcacgtaaggtcccgagtttgagaccagcctagccacatggtgaaaccctgtctctactaaaaatacaaaaattacccaggcatggtggtgcgtgcctgtaatctcagctactcaagaggctgaggcaggagaatcgcttgaacccaggaggcggaggttgcagtgagcggagatcgtgccactgcactcagcctgggcagcagactgagactgagcctctgtctcaaaaaacaaacgaggccgggtgtggtggctcacgcctgtaatcccagccctttgggaggccgaggcaggtggatcatgaggccaggggttcaagaccagcctgactaacgtgataaaatcccgtctctactaaaaatacaaaaaaaaattggctgggtgtggtggcgggcgcctgtaatcccagctactcaggaggctgaggcgggagaattgcttgaacccgggaggcggaggttgcagtgagccgagatcgcgccactgcactccaacctgggcgacagagcgagactctggctccaaaaaacaaacaaacaaacaaacaaaaacaaacaaatccatgtaaagtctgaagtaatgtaccaggttgttttctttgtggcggcgaatgttccacataacgtaaaatgttaacattagggagagctggatgaggagtatatgaaactctctggacctggctactgtgcggtaaatcaaaaattattcccaaacaaaaatgtattttaagtgtttcaatgcacatggcccagcagtttcactgcaaggaatgcaccccgtggttgtacccatgtgcacatgtgaggctgtagacacaagggtgtccaaggcaaccttgtcacagcagagggcagggagcacccagacatctcccgtaaaggcctggttaggtgggtcgtgagacttctgtatggcggtgccgcacgtagttagaaagacagggatggctctccatgttctgattcagaaccgtctctcagatgtactgttaagagaaaaactaagcagccagagtactgtgcaaaggaaataataggggtgtgtgtgtgtgtgtgtgtgaagagagaaattttttttctggaaggacatacgaaagaagacaacagtagttgccttaaagaggggaactgggggctgagagtgtgttttattgtatacctcatttgaactttgtactctattacccattcaacattaattactgaaaagaaaaattagcaaccagaataaagaaatactcatcagagaggggagtgtccacctgttccctacactgcccgtcccactgtgggtctaacctctgcctctctccctccctggccccgctccccgctccccgcttccctttcaggcctcagtaacatcatcggtatcatcgtctacatttccagcaacacaggtgacccgagtgacaagcgggacgaagacaaaaagaaccattacaactacggctggtctttttactttggagctctgtctttcattgtggctgagaccgtgggcgtcctggctgtaaacatttacattgagaaaaataaagagttgaggtttaagaccaaacgggaattccttaaggcgtcttcctcttctccttatgccaggatgccgagctacaggtaccggcgacggcgctcgaggtccagctcaaggtccaccgaggcctcgccctccagggacgtgtcgcccatgggcctgaagatcacaggggccatccccatgggggagctgtccatgtacacgctgtccagggagcccctcaaggtgaccaccgcagccagctacagccccgaccaggaggccagcttcctgcaggtgcatgactttttccagcaggacctgaaggaaggtttccacgtcagcatgctgaaccgacggacgacccctgtgtgagccgcctgccctttctctccgctccagcctctccccagaacggctctttttgtcacacaggatggcatgtgatcctcaagacgacgaacaatgaactaaagccaaatgcagccctccctggcctccagaggtggcgtgggctggctttgcacgaaggttgtgctgggagaccggacccggggctgcagaagaagctgaaggctgactttgtcccctccccgaaaaagggtgttttgatgcctcagggtctctgaaatctcccgggaagccccagagctttcctgaggctgcctggccttgatcaacttgggaagacaaaattgagccattatctcctcttggaaacgaatcttgccagaaaaacgggatttcagggccttccctccctgcctgggtgtcgggccaccagaaggctctgccggacgccaagaagacggtctctgggctcttgtcagctgcttttgaacctgaggttcctgcgtcgttgagccagaaatcagaccaccgaagctcactcccttcctctccatctctccctctctccaagactctggcagtggcctatgatcctgaagacagctctgcagccaactggtgctttggcctttgcgctgtcccggggccagcttccctcgacctggggaggccgtggcctgtggaggaggcccaggtaaaggctgggggctgttgctggctatcctctttgcttctggaagtttctgcctcactcagaatgggcaggacagacccactgactggacttcagagtctggagggttccatcggtcaggggaatggcggccacgtgacctcttgccgtgccccttgtcatagacccaaggagcaactctgtcccctgagcgttgggggtcccgggggagaggtggacagacacctccctccaactggcatttggcaacaggagcctggacttctgtgcaagaaagggagacctaagggtgaacagtggccaataaaaaccctagagaacaaacatccatttcctaggtggttacaaatcataacttcctgcaaatcaacgccaggagagcaacttaccttcatttctttgtcttaaaaagtagcagcaactggccccacaactcctgtcattgtaagttattctgccaccacctaacaggacggagtggagtgagtttggataaacggaccgagctgggcttctcttcctccctacagaggggagatctcagcactttgtccggagctgaggaagtggtttctgtgttttacagtttttccagccattcttttcttccccctcctgaagcaagcaaagagcgtggaggcgtgtgcaggcttggaagaagaactctccagaacatggaacttaaccctcttttgtataaaacatgtgctttctaaagaaaaattgtttcttattttttgagactccttgatccaccctggaacagtcgcctgtagtcctggtagctgttgtgcttggaaataacgagcgcatccttgcctcagctacctgctcacagcccatgggtggactcggccccctggggttcagacccaggtccgttcggcctagtgatgatgtcatcgtccatcccatcttcctttgcccccaggaaaggacgcatccaccggtagcggccccagctgactgtcgccgtgtgctggggatctgaaatgaggcctgccagggcccctgtgtgctgtgctccagagccttcgctcccatcagggttggcatcatctgatggcatgtccaagtgtgcccagcagcggatgctgaagcaccagagctcaaggccttcacctgctctaggccagccctgtcaccacctccactgccatgaccaggccgaaggcagggaacgccctccccagtcccgctgtccagcaaggccccgagacttttcttctgtgatttccaaaagcaaggcagccgtgctgttctagttcctctccatccgccacctcccctcccgctgccccagaagtttctatcattccatggagaaagctgtgttccaatgaatcctacctcttgcccagtcccaggcagagtaagcagggcccacctagggaccaagaaagagtaggaagaaggggacgagccgggagcaaaaccacctcagacacccgggccttctcagccttctccccgcggccagctgggtctccggggaccctgggccctgggccgcccattcctggccctcccgctgcatctcagacctgacacccaacggggggatgtggtggcctgtgcccaccttctctccctcctcccgacccgccccctcgcccccacccctgtgtgtttcgccagttaagcacctgtgactccagtacctactactggttttgggttggttgttctgtcttttttttaattaaataaaaacatttttaaaatgttctcttcttgatgtggggaggcaggggaagagccccccattagtctttgtgggcagttagggtaaatagatgtccctgggtctggggtacgctgtgcccctcccccgcaaccccccgccgccagaaaagaagaaggaggcccagggggcagggaggccaggctctggccaaggccgggttttctggcttttatctgggtcactggccacctccccagtaccaacggctggtttcaaacttctgggtggtgtcattgaggtggcttttcaccaatgagccagaagatacacaggctcttctgggtggggtgtgggcccctgggcagccaagagagcaaggcctgtcctcccgcagggtggaggccggccggagccacagccgccaaggccctaaagttgccctcacccaaggacactgcgtcctccctggtgaaagctgcccgttctgtagaggttctctgcccaggttcccaatatagcactcccggcagcccagccccagactcagtcccaagagatacacagatgggaagggagaaaggatctgagggaccttagactccagggactggccggggcagacacacctgagacaggtattttttaacttgcagcttgcaacaaaacagctggtgcaatctcaggaatagaagtcaacgataacagatggttatgaactcatgtccttgcacttggaattgcagtcaaggagagttggtggtggcggttggggggatgctgacacctgcaaaccatcactcctccaccctcctggggcaaagttttctcctctgagggtctaagttggccatcctgagccctttctcaaccccatcatctccccagctccttcctggcctctccctgactttcatcaaagacttcactttggctaaagccttcctctgtaccccaaatactgccgccatcacaacacatcgatgtccatggggccaaccactctgacttcctgaccacacagttctctggtcttctcacctccattgacttttatctccaaccttgaccttgtcatcacccctaactgtcccagtgtaatcttcagggccatcattctcctctctgaccacagtctccaatgctcccgattcctccatgccctctccaccgtgacacccattcttcaacctcatcaagcctccaggtcttgactcctccattttctcccaatctatcaatgcttcctggtttcagggccatcctaaccagtccagaccatggtgaggcatcatttaacctcgcctttgccaacacctcagttcccttgggctctcttctagtatttgtctcctagaagatccccaaccctcttccaatctcacctctcaaattttctccatctctgcacctgagcctcagggtaacactagagaaaatcaagtgatttgtaaattggtgcctgtgggaggcagaatggttgtcccctgagatgtccacatcctaatccctggaacctgtgaatatgtggccttacatgacaaaaaggactttgagagtgtgattaaattaagaatcttcagatgctcggattatcctggattatctgggtggccccagacagaaggacaaaggtccctctaagggaaagagggaggcaggagtgttggaggagggctctgacagagcagcagaggtcagagttctgggactgctggcttcaaagaaggaaggggccacaagctgaggaccactggcagcctctagagggtgagaaatctgaggggtctcccctggagcttccagaagaaacacagccctgccaacactttcatttttagttcagtaggacttaaaacctccagaactgatatgataataaatttgtattgtttaagccactaagtttgaggtaatttgttccaaaagcaagagccaatgaacacaatcccatgtgtatgcacggggctggtactatgctgcaccccagctatcatcctcaatgcccttgatatggtttggctgtgtccccactcaaatgtcatcttgaattgtagctcccataattcccatgtgtcgtgggagggaccaggtggagataattgaatcatgggggcagtttctcccatactgttctcctggtagtgaataagtctcatgagatctgatggttttatacatgggagttcccctgcacaagttctcttgcctgccaccacgtaagacgtcccttttctcttccttgtcttccaccatgattgtgaggctgccccagccgtgtggaactgtgagtccattaaatctctttcctttataaattacccagtctcaggtatgtctttattagcagcataagagcagactaaaacagccctgtcagtgggcaccccgatactcacaacagctatttcagactctcactacctccacgaaaccctccacacatcatttccatctcctattctcagacattggccccacttctgaggtcaccaagaaaacagaagcctttagatggcaatcccctcacctccccaccgctccaccacctatagactggtttccctcatgactcatctcttgctcggtcctttccatcccagtgggggaggtcacctccctctttctgtccatcgccagccctttcatttgaggtctggtcattcccatctcctcccctagaatcttgcatttctgtcttaaaacagcaaataccaggccggacgcggtggctcacgcctgtaatcccagcactttgggaggccaaggtgggtggatctcgaggtcaggagatcgagaccatcctggctaacaaggtgaaaacccgtctctaataaaaatacaaaaattagctgggcgttgtggcgggtgtctgtagtcgcacctacttgggaggctgaggcaggagaatggcttgaacccaggaggtggagcttgcagtaagctgagattgcaccactgtactccagcctgggcaacagagcgagactccatctcaaaaaaaaaaaaaaaaaaaaaaaaccacggcaaatgccaaacttccctcatgcctctccttcccttctaagctaagcacttcacaaaaagctctacacgtgttgtctacccttcctcacctcccatttcactcctcaatttactgcagtctgccttgattttttacctgccagttgtcaaaaccaatggacatgtttcaatcctgacctctgtagtgccagaacttatcagccactcttgccttctagggatgtcctctgcttctgacctctaagaccctaccctcttggtttcctctatttctctgccttctccttctcttctcctttgctggcttggtttccattctgtatccttatatcttaggccacagaactcccggattccactcttggagctcctctcctcttcacctcatcacttcccttgagtaacctcattccctctcactattacaactaccaccaagtccatatgtctaactcagatccttccccaagctccagatctcctcctggtgtgtctgtggtagactgcccttgtctcccaaaatctgttctcccctcttccatggtaatagagagctttagcttgctaaatggccacccagctaatctccggggcccttggagatggtcagaggtataagttctcaacaatttaagtgttttgtgcaaccagtgtgtccactgcttataaggaaattgtttggtttgaactcccactctttcccccttcttgtggtctggagctgccatgtcagtgaccctggccttgcacacaaggacgataccccagagcatggtggagcaacaagacagaaagcagccatgttccgttaatgactggatggagacaattaccctgccagccacactgcttgaaagagaggaatgccatgcttctgcccggttaagccactgcctttgggggtctcactgtgatagaagcatggcttgtatctaatgaatacagtacctgagcctgaacccatctcctgaacactcagtcttttctcctccagctcatctcgtctgtcagtagcgtcactgtccacccaggcctctgagtctgaaatcccaactccttccttccatgtttagtctctcaccaaatccctttgggtctcccacctgtgggtcctcccagtagaccccttcctgctttggttcctactgccatctctatcttcattcaggcttttgttatttccatctcaaccccttctattgcctgcattgctgctggtccagagtattagtccattttcacactgctataaagatactacctgagacggggtaatttataaaggaaagaggtttaattgactcacaattccacatggctgggaaggcctcaggaaacttacagtcatggcagaaggcaaaggagaagcaagtactctcttcacaaggcagcaggaaagagagagagaggaggaggaagcgccagacacttatcaaacaaccagatcccatgagaacttcctcactatcacgagaacagcatgagggaaaaccatgatccaatcacctcccaccatgtgaggattacatgtggggattacaatttggattaacatatggggattacaatttggattacaattcaagatgagatttgggtggggactcagtcaaatcatatcatccaggtagttgtagacatatcaatgctctgtttaaaacccctctgcacgctggtcaccgtggctcacgctgtaatcccagcactttggcaggccgaggtgggtggattgctcaaggccaggagtttgagaccagcctggccaacatggcaaaaccccatctctaccaaaaaaaaaaaaacaaaaattagctgggcatggtggcaggcacccgtagtcctggctgagatgggagaattgcttgaacttgggaggcagaggttgcagtgagtcaagatcgcctcctgcacttcagactgggtgacagagtgaaaccctgtctcaaaaaacaaaaacaaaaacaaaaacaaaacaaaacaaaaaaacccattctgcagctccagatactcttagacaaaagtacactattttctgacatggtttgttgggctctgcaaggtctgatccctacccatctctccagccctgtctctctgtccccccccttgcctcccttcacctgcccagacctaaccacttatgcaggttagagtctggacctctcctccccacaacctccacacctgctctttccctgccagctggtccttccttcctccgtccttaccccactcagcctccatttcacccatgaggtctcctgactaccccctccagtgtcactgtccctaccctagtgggccaggggtccccaaggctgccctcaagtggtcttaatgattcactaggaggactcacagaactcagaaaagctgttatactcatggttacagtttactgcagaaagaatccagattaaaatcagcacaagaaaggggtgcagagggcagagttcaagagagaccaggcgtgagcgttcagtcgtctcccccaagggagtggaacagacttcattctcccagcagtgctgtgtgacaacatgcacaaagtatcgccagccagggaagctcatctgaggtgagacttggtgttcaggttttttattgaggggcggtgcctatgtgactgaccttagctactcagtattcagtcccccatcccagaggtcaaactatctgaggtggtccagggcccttaccatcaatcacattgttagcctaaactatctggtgcggtccaagactccagctaggtgaaaatactcttatcaggtagagtattccaagggcatagaggttatctcccaggagccagttaagggccagttctttctttggaatgtgtagggtttggacaacccaggcctgctgagttaacccttcactgaacaccaatgttcccagcatgccctctgctatccatcagagcagactcatgttagttgatgcctgactctcccaccagactgtgggctcctagagggcagactcaatgtcttattcacattctaatagccctacagtgatgagtaagtgtttaatgaatgaatgaatgacaacaacagtcacaaaataatatttccctagctccatcactacccattctgcaggaaccactgtcatcatcagatttctccagaagcattcccagagtgagagcagtgaggcggacagtcaatggggatttgcatgttctcatcaaacttctattctcttggctagaaaatcatcatcattatcttttgactctgacctgctcaataagatgtttcctgctgctgcccaagccatgggcaccaacactgcaggtgcccagccctctcagagtcccatgaagcttcttgtgaagtaacatacatcacagtcttcatgtgcgtgttacatgtgcacacatgcattaccgcatttaattctcgctataaccctacaaggtagttatgatcctcccttctttgtgagcaagaaacaggctcagaaaggtgacccatctctcacaaggcacacacacagtcaacagcaaagctggggctccaggctatgactgtcacttccagaaaggatatgcgctttccctaacagctgcgtgctccacacagcagccaccccgggacactggcatgatgcttaccacatcctaggcaccacctgtacaattacttgcttcatctttttctttaaattgtcacttttaatttgaccttggcctaaagaaattatattaataatataactcagatcctcatgaaaagaaatatgaaaatctttaggccaggcatggtggctcacacctgtaattgcagcactttgggaggccgaggcggatggatcacttgaggtcaggaatttgagaccagcctggccaacatggtgacaccctgtctctactaaaaatacagaaattagctgggcatgatagcacatgcctataattccagctacttgagaagctgaggcaggagaattgcttgaaccctggaggcggagattgcagtgagctgcgatcacaccactgcactccagcctgggtgacagagggagactgcatctcaaaaaaagaaacataaaagtctttaaatcacgggctgcctgctctcctcctgcaggggtgtacagggcgcactttgagaaccccagctgcgggctcaagtctcccgaggggcccatgtcctgcctggagctcctattctccacacctctccacgtaggctgagttctgtcccaggagaccccacagcccctcccagtatgatctcagctgccctaacagtttgtggactcctcaaggggagggagtgggtcttctgcttggcaggacagaaatcccagcgtgggccttattgtgccccaacttaactatggcccaagccctggctggcctgtatgttctggagtcctcaggagggtcctggatcaatggggagggaaatggccaccgtggcagggcagccagaaaaagctgccagaagtggaggctagcagaggggggttgcgaaacaaagggagttggactggtgcagataggataaaaacatctcaggggtacaagtaagcatcaacatctggagaacagaacaggaaagagccccccaaatttcccacaacactgtgagtaccaggcatccagggcgattgatttcttaccattacgtccttcgctgaatcaagtactcagtactctattaaatgcatgacggccactctctggtctcctcttatgagaacactgctacagttgggctctgtgtccccatccaaatctcaccttgaattgtaataattctgtgtcatgggaaggacccagtaggaggtaattgaatcatgagggtgagtctttcctctgctattctcacgatagtgaataaatctcacaagatctgatggttttataaagggcagttccctgcacgtgctctcttgcctaacgccatgtaagacgtgcctttgctccttcttcaccttccgccatgattgtgaggcctccccagccatgtggaactgtgagtccattcaacctctttcctttataaattaccagtcttgggcatgtctttattagcagtgtgagaacagactaatacagacactgctcccatcacaagggccccacttccatgagctcatttcattatctcccaaagatcccacctctacacaccatcacactgggggttaggcttcaacatatgaacttgggggaaacatgattcagcccatagcgcctactatggctaagctggtccaacgcactccctccagcccttccacctgctccgcagccaggcccgttgccttcattttacaagaggcagcttagaaaggctaatgacttactggaacgtgcacagctggagccaagcagtgcagggatttgctcggggctggccagctccatcaccctctagcttggtccccctctcgcatgctgcctccctgagatgctcctctccctgttgccctggaaagggtgagatcttgggggaggacatggatgttgccctgcccaactttcagcaaatgcctgtggctactgaagtcccttcctggcccttccaggcccctggggaaccaggcaggcagcgcggcagcacctctgtgagcagaaaaggtgtatttgagggagctttcagtaaacagggaagagaaagtggacctgcccgcagtagctgcagctgcgggtctcctggtgcgacttacacaaagatgacttcaaaaggcagaggccatcaatctttaatgctttcactgcactggggcggaggactctggacccctgcatggggcacaaacctgccccccatggagggaaagagcagcagaagttcctggttgctgtcctcaccaaggcctggcatctttgaagggcctgcaatgtcatcatggctggcgctgggtgcaccctctgggctgggccctttcagggtgctttccaaggccgtcagaggctcttggcaccgaagagcttagggcatccacccccaccacaccaggaaattcaaaagacactttcatttttccaatgacactgtatttacttgtaatgctaaaattaaatagcttctttctagattttctgtcttaaaacactggaaccctcttctggctccccagctactgctttgctgggtgcctggcactcagtaggtctaatcaagctgtacagcacctcctgagatccccaggtgccaggatcctgaagctgggcccccacaaacaacaagagagggctcagaggctgcagccatgtcccagcttctgggaattccccatggagatggtctacccacctggtgacaggcagtttctccacgagctgaagcaggggcggtggcatatgtcaacagtcagtcagtgatcagtcagttgtgatggattagcacccacagggaacacagaggtggggggacagggaggaagggaagcagagatgagaacagtggggagataagctctcaggagattgtaatatgtatgagagactgattttaaaaatatggaagtttggatggaactgcaataagcacaagccagtggctggagatgcgagggttcagctcagccctggggctgttcaccaggtagtcctggctcctcacatctcctctctgggctgcagattcctaatctgtcacaatagatcatgaagtttcttcccagttccaaccattcgttatgactttgggctctgggtcctgaaacctggattcctcattttctcgctgtgtgaccttggacaagtgacttcatgtctctgagcttccatgtccttgtctgtgaaatggcagtaaccgttgtagtccccttgtggattggtgtgaagagtaactgtgacaatggatgaaggcttagcagggtacctggtagatagtaagcactcactgaagatgagccactgttctgattatcatcatcatgaactttctgtgattctaaggctggaggccgaaacatttctgtccacatgggcagagtctctgtaaatcgtgtcaatctgaggccaggattttgaagctcaaggccccacccagctcaggaggctattcctggtcatgcgtcagcctctcggctacacccaaaaagggccaccctgtgagccgagaaggaagagatgacacaacccaggagagatgtagaggctggagcctcggagaccagcctgggggccaggcgggtgcacaggaccgtcggagggtggtcgatcccgggctttctgtgttctctgcacgcccatgagctcctaatgatcccctataaatcaacctattcattcttttttactcacacacttatttttcaaattcaaacataactggaaagtcgttatcacctgctgttaatagaaggcaaaaccaaacagtgccctgaaaaacagaatgaccaagtccagcaggattcctcgtcctcttcgggccgttctcgctttgtttcaaaggacactttacaggcaataatgacactgacctcgaacagagctttgctctggacccagttttggggatggaaagagaattgaaaaggaagtaatgttctcgtggagggatcagagttgggtaaggccagacctgggaaccacctaaaaccttcctatggtttgggggatgccgtggggtttgtggctaaaacgcttgcctaagaggtggactccacaggccctggactgggttcccgggatgtcattagacagaatcctagcccctcagatcccaggatgagaacctactcactgccctgccggtaacaggcttaccccgtgggagcccgggacagccgtgcagcccgcagctcctggtctcctcccctggcctgggctgccctttcccatcagcccagagcaggcagatccccacccccggggccctgctgcccacctctcgccctctcccaactcaggcaccctgagctgctactcacagaggcctcaatctaccatccagagccttctctccttgccaccctgccccgccgcactggggtatttctggctcccagaggggcagaaaaccctgaaacccgagcagaagctgtcctcggtgccacgcctggagatgggcattaatagcagcctccctcaggcccctgacgcgtctgggcagctgctcagcacgtcccgcgtccctcggccccaaggccagcccactctggctcagccaggcacactaaacttagtggccactcccagctcgacaaccactgccaccccccaagctcggcttgtcacctgccctaggagacgcagccgccggaccctgcccagggcacccacgcctcggcgaccaccatgtcccagaccaaaatgctgaaggtccgcgtgaccctcttctgcatcctggcaggcatcgtgctggccatgacagccgtggtaaccgaccactgggctgtgctgagcccccacatggagcaccacaacactacctgcgaggcggcccacttcggcctctggcggatttgtaccaagcgcatccccatggacgacagcaagacctgcgggcccatcaccctgcccgggggtaacgtacccaccctccgtcccgatccccacctcctgctcttccccgtcatccccctggcaaagttgcccttgcgaaggaaggcaggtttctctgcctagaaatagggcagccgcccagccttttctgcccagggaagaagatatgaattgcatgtgtggtgctggtggctggggctgggttgtaagacgagggcgtttgtcccagctatttctgtctggctggaccttggggctttttgcccagagcagagagctgggcaggctcaagaaaggaactgcagctctaccagcccagggacttctgggccccacctgctcactctctccctgcaaagaaaagctaggtggctctgtgtcctcaggctagggggacccatggggctggcaggtttgttcctggcctcaaggcaggagaggagagagcataggcgatggaatttgcagggtcctgtgcagaatgaaaatgcagggttccttgctccaaattaccaaggatttcaaggcagtgacagcagcacatgaaaccacacatgggcccttgtgggctctgggcctggagcagctgcacaggttgaatgtctgtgaagcaggacatggctgtaggctgtaggtgagccacctgcccccaccttctttttttttttttttttttttttgagacaactttgtcgctcaggctggagtgcagtggcatgatcttggctccctgcaacttctgcctcctggactcaagcgattctcctgcctcagcttccccagtagctgggattacaggcatgcaccaccacacccatctaatttttgtactttcagtagagacggggtttcaccatgttggtcaggctggtctcgaactcctgacctcaggtgatccacctgccttggcctcccagagtgctgggattacagacgtgagccaccatgcccgacctccacctgtccttttgtcaggacttcagtcctctatgcatcctgtcttagctcagaccctgtcagagttacaaagcatttcctcaccctgtaatttaagcgtattcctcgatttcctaccgtgtgaccgaaccacacgttgaaggtaaggtccttttcaggagtacctggtagtcgcgtgactagcctctattctgcaaatgcagaggcttctggattcttagcaaatacagcactttagaggaaagagtgctcatggagaccaggcagccagggatctaatcgccattgcccactaccctcaaatgaccatccagggaggacaaagctcatctcagcctctgcttcttcctctataaaatatgggactgactctcagcaacgtgagatcccttcctcggcttacagacgcccatccacagtggcagtggagcagagtgatgtcagtgtgatgtcccacctggttttcaggattatttcctcttttatcagactaggtgttccttgaaacctgtccttcaaggacactagggctaagtccccaaagatcttgcagtctgcttgtgaggcaaagagcacagaccccatcctcccttgtctctgctccctcttccttccctcctgcttgctccagagatcccctcccttgttcagccccactggaggcccagaagactcataagtgcccagctgttgtagaaacaccaagtcccagggctgagagtgacaggtgtggccatgtgcttgcagggtatcgcatagcccggatgcccatgccccttggccactgctgagcacacccataaacaggaacagcctccagccaactcccctgggcagggcagggcagggcagggcagggcaaggcagcttcttcagggaccacacatggggacgtgctgttacagtcctgttcacccgtccttggaaccatctgccttttaaagtcagagcagaagactgggcagtgagcagaatccacacaaggaagagacaggctggtgagaggtgactggaccaattgcagggggccaacaggcattgcttggccttgagcctgacaggatctacctctttgccttcttagcctaaccagctatgaaccacacctcccacacttgtgacactgagcactacctttcccccagtaatcttccaaaatatgttcctgcctttttccctctcttttctctgcaaatggacatctttctccttccccatctgcccttcttgtgctccctgggaccactcttctctggagggaggaagtgggttcatatgtggcccgtcatctattattaacaacaataataataatggcacatacatgtagccctgtgtgccaaatattgttgtaaacgctttacatatattaactttgaaagacatcaggaaaaaaaatgatagaaaaagaacctccaaaaataatcttctccataatagtaatgagaaggctggcagaaatggtcagaatcaacattttcagaactctggaaattaaccaaagtcttgcagcaatccagcaagaaaaatgggtgaatctcaggaggaccagtgagttctgtggtgttttaacttgccttattcctgtttccctttcccagctctgtggtaaccttgcaaaccaacattccgtaatcacagtgaaaatcagcatcccagtagcctctggaggggagagaatggggttggatcaaaggcccattcccagagagttgtcattatttgacctgtctggtgattccctgaaaacccccacttgagaagctgtttctgtttgacctgactctgagctcatccagtgcaaatagtctttctccctggggatgtttgttgaaaataattagagatgattgattaacatcatggctgtctgaggcagtagataacagttagggaaaacaacaggctaaccaaaaaactggagactgaaatgtccataagttgctttgaaaagctccaacatattcctgggaatctaggaggccacatgcatgcacaatgctatatgcatgctcaggaaagacctgagaaggccctaagcactctctgccttatcttgagactctgttcaagcaggaagtgaaggctaaggcagagatgtgggtggcttagctgagcatgaaagtcatatgcacagagcccctcagtaaagactgggagaggcattgttgccaagcgttttaggaaatttataattggtcactaagctaattgaacagggatctcagtgatcacacatgacaaaaaacacatactttaccatcttagttcaaaaaagtcactaaacaaacaacgggaacaaatcttcaagaagggggaacaactgatttccagagttgccacattatattgtttaaaaaatactggctgggtgtggtggctcactcctgtattcccagcacttttggaggccaagtgagaggactgcttgaggccaggggtttgagatcaacctgggcaatatagcaagaccctgtccctaccaaaaaaaaaaaaaaaaacaaaaaaaaaaccccacaaaatatccaggagtggtggcatgtgcctgtaattctagctactcccaaggcttaggtgagggaattgtttgatcccaggagttagagactacagtgaactatgatcatgccactgcactccagcctgggtgacagagcaagactctgtctctaaataaataaatacatacataaataatacaagacacacaaagaactaaaatgataaggggcatacatggggcagggagaagtcaatagatctgtaaggaagccagatattggacttactagacaaaaactttaaatcagctatagtaaatatatccaaagaaaaaacaatcaaaacaattaaagatgaaaatgatgcctcatgaaatagaaactatcaattaagacacagaaattatttttaaggacaaaatagaaattctggagttgaaaagtacaataactaaaatgagaaattcactagaggggctcaatggcatatctgagcaggcaaaagaatcagtgacctttaagataagtcagttgagattagccagtctgaggaacagacagataaaaagaataaagaaaaatgacgagagcctcggagacttatgggacaccatcaagtttatgtaaagggagtcccagaaggagagggaaagagagaaaggagcaaaaaaggtatgtgaaaaataatgtccaaaagcttcccaaattggatgaaaaacgttaaaaatcgacaaatttatgaagcttaatgaactccaggtagaataaactctaagggatccacatctagacacatgataatcaaactgttgaaagatagagacagagaatcttaaaaacggaaagaaacaactcaccacatatgaggaatccttaataagatgaacagccaatttttccccaaatctatggaggccagaaggtggtgggatgacatacatatattagctcacctaatcctcacagaaacctccgtgaaggccatgctattatcatcatcccaatcttacagataaagaaaatcaaccactgagagttgagatatttgacaaggtaacacaggtgatgagcagagcagccaggactcacactcagaccctaacattcaccgttttagtcaatacattaactactttacaacaacccagtgagtgggttcttattctacaggtggttcttattctacaggtgggtctcattctacaggtggttctcattctacaggtggttcctattctacaggtggttctcattctacaggtgggtctcattctacaggtaggaacagggaggctgagcatagccttccccaggctaaccagctaacaaatagaggttctccactcaagtcttgaatccagagcctcctttccctccagttccttctcacaccctctattgtgcatgaaaacacagctcctaaaagctctgacccaagtgaacacaaggagtccagcttttgacatggcatagtttgagggcagctggaccagaagctggtgcagtggagcagacttctcaaggtcccacttagtcttaaaatgttggaggctcagtgggcaagagttgtctaatttttccaaattagacagtcttagactccaaacagtcttagaaggacttccatgtacaagatcaacatccaagaccaattccaatgcctccagaatgagagtaggagcctctcccaaaggagagactatgtgttctgaaagtccaaatgaacccgcaaagaggccatcccctgcccttgggctgggtgaagtgctgcttctttcagactctgcctctttagggcaaggaggcaggttgccccagggcccactttgcctagtgccccattttccctactggtccatcttctctcagtgcgggaactgggattgtataaaagagcatgatactactgaccccaggaatttcatgggctcacttcaccacccacagaagtccatgccagaggcctaggccaaagccaggcttctcccatggaagagcagtgctctgaagctctagggtcaggtcttggagatttccagcccattttataaaattcttcaatcagagatgtggaaggagacacagcccagagaaaccactgttgggagctgatagaacttcttttaccaaaaggctaaaaacaacactgacatcaatgcaagttagaggcttccttgcacccctaaagtaccagtttctttggttttggacaaatccacaaagtatctttgaatatatgaaagtctccatggacagtcacttggcacactgatacattctcagtgataacccaaggcatccactaatcctgccagctgttccaactatcaaagaaagatccctattaactcaagttcagcttggagctaaatgtggcttctgctctaattctttgaaactggcacactacacatggttctgcacagttactgatgcccttaaccagaacactgggttagccagactattccatcccccagtcaagtctgagagctgagttcaccatatttttaataaataacccatttaatatttttaaaccgctgagtcttacagaaataaggagattaaaatcagcataagccatctgcagagacaaaggagaatggcacgacctcagagttcctaacaccccagatcatcatcctggcattggaatctttgctgacttagtcggaagcaaagctgcaatccctgagctttgtgtaagtgtgatggaagccagggcagcggggcagagaggggcatcccagaggcagaggcaggaagactgagagtctgcacaggaccgtcacggtccctctcctcttgacccatgactaagatgggtccacctcggatgtccttcctctttacgttgccctggatgctcagtttcccaaataatatccacctagacccaggaacagggcagggagggaaggggctcatagtagggtctgtccatctgaacaggaccctgcaccctcttgagtaacatgggcagatgcctggcctgatttgtcctaaatgaggcctgggtctgacgtgcccccacccctacaggggccattagagaccatgaaagggtttatggtctccaatgggcagccacatagcccaggagtggatgtttctctcaggttcagggcaggagacaccggtctttttcacatgctaagcccaagaaaggggagaggtcagcccatcagtcctcaggcccccagttcagccatgtaagagtgaagctgaggcttcctgttaccctgagaaggaatcctacccactggaggccccctccctccatttgaggacacttaatggagaagagggaggaggaacactgtacctggaccaccaaaagaaaagcatccccccagaagctcacaacctggctcctgcagacacgtagcctacccctgtgtctgagttaagatcatttctatccaagcagccagcagccaggcggagcctggcgtttatctggtggggatttggtgagccaaatgctacctgtgtgagagtcacctcagcaacccaccaggtgcaaacagctgtgcccccagcaaggcactccatggccctcatctcagggccctccgctgggaaggattttaacttatggcttttgagcagtcagggaggcagctgaccatgaaatacacttgaattcagtcaattctgacaactgaaattggcccttcaagaatgaaacagaaacagaaatgtttctttgtccagagggagacacatggagacttatgacatagcatgggccattttgaagcagtgattcgagagatctacagccaataatctaacaaatagaagagatctgcattatgctttaaaatagcaccggatgcccagagagaatagcagagcaccaattctgacatcaccaccagcagtcagacaccccaggtaacgcggttcaaaaggaaagtgatttaaatatagaagcacacagagaaggctgtttatgccaggaatgggtactgctgctaaaccagatcccatctccaggggtcatttgcttcctcaacctcaggagaggcagcagccctggctctggggggaaggaggggcatggtatgagaccacaggcttaaggtgcaagaagaatgatttaggtccggttaaagaaagtcttcatcccaaagaaaagccttggtatcactgcaggtacatttccagaaagaactaggcatcaaccgccttatgagcatctaaatgaagcctggaagtgaagaaatgaattggcaaactagacaccatctcaactagagaaagagatgtttttctatttaagggtcactgatccacaggaaaagaaatcaatgaagggcctccacaaataaaaagcaaactaatttagttttggaaggaaacataatataaaataacccattcatccacttcctaaatcaagagcaaagaagataaaccgtatttagcaagaaataagactgtgctttttttttttttgagacagagtcccactctgtcacccaggctggagtgcagtgacacgacctcagctcactgcaacctctgcctcctgggttgaagcaattctcctgcctcagccttctaaagtgctgggattacaggtgtgagccaccacgcccggcctgtgctttgattttatagtatacctagctatgagagagagactgaaagagaaaaatggaaatgaaattatattttaaatcagcatgaatttccttgtgctgagcccctcccctctccctcatcaaattcagatttgcgttcctactgcccacagactttccatagcttttatgacaattatcaggtgggccaagcggctttgtgggggcaggtctcatctgggctgtctcgcaaagaccagggacccagtgaaaccacatgatggtcacattcagccctcgtaggggttccatctgcatccaggccatcccaatggccactcggaaaaagccctttgcagggcattttaaggggcctggagcagggttcccatcctggctgcacatcaggctctcccagaaagcttttgaaaaacactgtttcccaggtcccaccaatgaaccagggtgtgcctggattctgatgagaaacacagtcccaggtttggggttgatccagggtttctcaaccttgacactcttgatattttggcctggatcattccatgttgggaggacctgtcctgtgtgtcttgggatgttcagcaacgtctgtggcctctaccggctgggtgccaggtgtacccctctcaccaccaccataaccccaggcatcgccaagtgtcccctgggggggcagaatcggccccaacagagactgctgtttggttctttgttgattgtgcaccctgcacaccctgaaaaatggcttgagcctgggcctcggttaccctgtctgcctaatggggtgcagaacccacaggccgtctgccctgcagactcatccagcctcagctccctgaagacctcccagccctgcaggcaacctcattatcccactgagatgttgttctaagggtcaaagacagatgtttcagcccagattaaggatctggggagaagagaggctgccagagccccctgcatgccgagcagaatgacaccacgctctctgccaggcctctgtccttgctacgggttgctcccctcaactcacagtctgtctcctcctttgcagagaagaactgttcctacttcaggcattttaaccccggcgagagctcggagatcttcgaattcaccactcagaagggtgagcctgggtggaaaggggtctggggtgacaagaggggacttctgtgttgtgcaccactgggccagaaagtcattggcaaaagcactgacttcctcacgcctgatgagaagaagcctgtggtgcatttgaacaacagccttgtcagctccccgctccggaggccccaggcagccgccttccatctccagggcccggagcttccacacctcggggccagggagcgtttgcagaagcagcacctcctggtaggcccctacacaagggcagctgttgtgacgggaggtgtggatgtggaacaaatgctcagaagccccgtggtggctcttggtggcatgtgatagttagagtctgcagggacagtctgagtccctccctggcctagaaatccctccctgagtaccaggagggtgcggtgggctctgggagcttttcaggatccgcagagctcagacgcacacccattgtcgggagtacagacccgtgcctgcctgcgcccagacagctgcacacagggtgagtgggcagacacacagacacacactgacacacacagacacacacaacacagatacacacacacgacacacacaagacacagacgcacagagacactgacacacacgcatgatgacacacaaaatgacacacagtgacacagacacacactgatacacatgcatgatgacacacaaaatgacacacagtgacacacacagacacacactgacacacacgtacaatgacacagacacagagacacacactgacacacacgtacaatgacagacacagagacacacactgacacatatgcatgacacacaatgacacacacagacactgacacacacacagatacacacatacaatgacacacacaagacagacacagagacacacacttgacacacacacaatgacacacacagacactgacacacacactgtggtgcatggtgtggtccctaacgagccatgacaagagctcccatgctgaggccgcatgctgggtgtcccttgtgtttgcagagtacagcatctcggcagccgccatcgccatcttcagccttggcttcatcatcctgggcagcctctgtgtcctcctgtccctcgggaagaagagggactatctgctgcgacccgcgtccatgttctatgcctttgcaggtagactgggggatctgcctgagcgccggggccgggggaccatgtcgcgggggattctccgctccaccctcatgcccaccgcgagatttgggtgaggggcatttcccaggctccatccccatccaggggcaaacctggccaggccatcagcgactccaggtgggttggagggagacagagcttggcggtttgtccattcctctccacgactcaaccctcaaggccccaaagaaactgcccagagaatgattaacaaaagaaggaaagaaacgtggtcacctttctttctttttcttgggggatgaggaagagggtctcgctctgtcatccaggctggagtgcagtggcacaatcacagctcactgcagcctcgaactcctgggttcaagggttcctcccgccccagcctcctagtagctgggactacagacgtgcaccaccacacctggctaatttttcattgtattttaattttttgtagagacggagggctcatcactatgttgccaggctggtctcaaactcctggcctcaagcgatcctcctgcctcagcctcccaaagtgctgggattacaggtgtgagccaccacacctggccacatggttgcccttctgagggatgcaggaatagggtggtgggtggacaaatggatccttctgcaggttcccatctagaacctgccttgaggcagcttttcccccaaggcaaggtcaccgcctcctccatgcacacaggctgggatggggctggtggctacggcagacgcccctcggtccctgagcatgcctggctctgcccccaggtctctgcatcctcgtctcggtggaggtcatgcggcagtcggtgaagcgcatgattgacagtgaggacaccgtctggatcgagtactattactcctggtcctttgcctgcgcctgtgccgccttcatcctcctctttctcggcggtctcgccctcctgctgttctccctgcctcgaatgccccggaacccatgggagtcctgcatggatgctgagcccgagcactaaccctcctgcggccctagcgaccctcaggcttcttccccaggaagcggggtcttggcctggaaccttccagagaggaggcgggagcaattttagccccaccctgctcccatctgcccccctgcaacagtcgcaggctgcttcctctctctgagttcctctgggctgccgcaggctcccctgggaatagagcaagacgtgagtcctaacctggccacagttgggggaggcagagccagcaggtggacaggtgtttgcaggggcccaacttcccctggagctcagaggtgtccccactgtaccagcctctgataagctgcctccagttgtcctttatgaacattgcagggacaacctgtgtttgccagctgggtgttccgtgtaaatagccagcctgtctctttctcggtgataaaacacaccctctctggtgagcccagcgtcccctccttggcttccaggagccctgggaagcatttttaactgggtagaatctgactgtggcttgaaataaaaagctctcagaaaactcatgctttcctggagccttgcatagaaatcgctcggattcccagtcacatcaggggctcccctgacgccgaatgagaaggaaaggccggtcacccgggtatgttgaggtcttttgtggggacaagagggcaacgcacgtggcttagaggctctgaattccaactcgtatctctaggccctgagattgttttcgggagaaactagaaaccctctgatgaagcaagggtgttaaaaataggaggggttatttctagagcctggcatgcaacgcacctggtgccaacacagcgctaaagcagccagccagtgtctgatttctgatgttggatttttcttgtgaagaacatcaggaagcagggcttagcagttagacacttagggccacatggagagccatgatttgcactcttctgccttccaaaaccccgcagtacttgcccaggcttccaaagtggagttcagacatgatcggcagatgggatccttgccttgcaccccggagaacccactggagttcacgcttctagggcagggtttggcaaactatggcccataggccacacctggcctgccccctcttgctgtatggcccacaagcaaaaggtagtttttacagttttaaattgttaaaaaaataaataaaattttttttttttaaaaaaggccaagcgtggtggctcacgcctgtaatcccaacactttgggaggccaacataggtggatcacaaggtcaggagttcaagactagcctgggcaagatgatgaaaccccatctctattaaaaacacaaaaaattagccgggcatggtggcatgtgcctgtaatcccagctactcggcaggctgaggcaggagaactgcttgaacccgggaggcagaggttgcaatgagccgagatcacgccattgcactccagcctgggcgacagagtgagactccatctcaaaaaacaaaacaaaacaaaaaaacccccaaaacaatcaaggaactgggcatcacggctcacacctgtaatttcagtaatttggaaggctgaggcaagaagattgtttgaggccaggagtttgagaccaccctgggcaacacagcaagactccatctctataaaaaataaaaataaaataatttacagataaaaagaagaagaatatctcatgacacatgaaaatgataagaaattcacatctcaatgtctgtaaataaagttagattaacaccaagccacgcccattctatggctgctttcgtcaccattgagtagtttcaacagagatcttccatcccgcaatgctgaaaatatttactatctgaccctgtatgaaaaatgtgtgattacgcctgttctggaggaaaactacaaccatcagcccccatatcaacctcttactggtcccatctaaaagctgaggggaagttcattatttcagttcgcctgcggtatctcgggggtgtgggctgggctaggaggggtgtcagaggagactcactcaaagacgcaaagatccagccaggaaacaaacttgctccaggtaaaggagaatcagaagatgactgtcctggccagccagggagctggggccatgatttatgagtaagaaggaagagcgataacttcatcccattgataaccattttggaggttgatattattggtgtttttctttttttcttttttgagacagggtctcacgttggagtacagtgcccaggctggagtacagtggcacaatcacagctcactatagcctcgagttcctgggctcaagtgatcctcctacctcagcctcccaagtagtagggactgcaagcgtgcgcagaccacacccagctaatttttttttgttttttgttgagacagggttttgatatgttgcccaggctggtctctaactcctgggctcaagcgatccgctagccttggcctcccaaattgctgggattacgggcatgagccaccacacccagcctttttttttttttttttttaacagatcggagtcttgctatgctgcccaggctggcctcaaacttctgggctccagatgtcctcctgcctcagtctctggagtagctgggattacaggtgtgagccaccatgcctggctccaatattattcttttattactatttttacttttagcagaatcagactggcatgcattttttcttttcttttcttttttctttttttttttttttctttagatggtgtcttgctctgtcacccaggctggagtgcagtggtgtgatctcagctcactgcaacctccgcctcccgggttcaagcaatgctcctgccttagcctcccgagtagctgggattacaagtgccggccaccacacccagctaatttatttttggtagagacggggtttcaccatgttggccaggatggtctcgaactcctgacctcaggtgatccacctgcctcagcctcccagagtgctgggattacaggcgtgagccaccatgcccggggccttggcatgcattttctacttccccatggatgcctatgggtcggtccccccaaaacacatctgaatggaatatccaccaaacagaatacattcggcttcccaggcttttaactcttccaagatatacttcagcacagccagaactgcgatacaaaccaaagggttggaggctggccgccagagagccacacatcctggcatctgccccagaaagaggcaacgcagcaaagcaaaataaagttgaccaaaccaatgagggaaaacgtcttactccccacccgccaaatgctgcttgccagaaggatgtccacaggggaaaatggttggctttgccagggactgaaggcctcacttcagggtccatgcaggccctgctctgaaggccacccagagcccaaccacagaacaaacagtgccatctgccctgaagccttggttggcctcagaagctactggcttctcattccttgctgtgggaactgtgtgtttttttgttttttttttttgagacagagtcttgctctgttgcccaggctggagtgcagtggcatgatctcagctcactgcaacctccgcctcccagattcaagcgattcttctgcctcagcctcctgagtagctgggactacaggcgcccaccaccacacctggctaatttttgtacttttagtagagacggggtttcgccatgttggccaggctggtctcgaactcctgacctcgggtgatccgaccacctcgcctcctggaactatgtgactttgacccacagcacaccttgatgtcctgtcacacttgcaatttctcagcgttttttgtttttttattaattttattattattattattgagacagagtcttacttgctgcccaggctggagtgcagtggtgcgacttcagctcactgcagccttgacctcctgggctcaagcgatcctcctgtctcagcctcccgagtggctgggaccacaggcacgtgccaccacacccggctaatttctgcaatttttttttagagacagggtttcgccatgttgcccaggctttctcagcgtttttacatccatcatcttccgtgaggcaaagaaggcagcagaggcaggaccagcaactagttcatcaagatccagacttaagtgtgattttttaagaactgtggtaaaatacacataacgtaaaattaccatcttaatcacattttcgtgtagagttcaatcacgttaaatacactcgcattgttgtgcaactctgaacaccgtgcatctccagaactcttcgtcatcccaaactgaaactcacaagcactaactctgcgtcctctccttcccacagccactcttccactttctgtctctgggagtttgactcctctaggtacctcgggatcagcggaatcatggagtattggtccttttgtgacgggctcatttccctcgactgctaatgcctttaaggttcatttgcacggtaccaggtatcagaactcccttcctttttcaggctcagcaatatcccactctacgtattcccatattttgtttatccactcatccactgatggacgctgggttgtttccaactcttggctcttgtgatttactgctgctatcaacacgggttcatgctctgcttcaggccctgcttttggttgttttggatgcactgactgggacatttttaaaaaattaaaattaatgcaaaatctccacaattaacaccatatcaaaactattaagtaggtgcaaacgtaattgcagtttttgccattgagaggaatggcaaaaactgggcagatgtggtggctcatgcctgtaatcccagcactttgggaggcagaggcgggtggatcacttgcggtctggagttcaagaccagcctggccaacatggtgaaatcctgtctctactaaaaatacaaaaaaaaaaaaaaaaacagccaggcgaggtggtgggcacctgtaatcccaactacttcagaggctgaggcaggagactcgctggaacctgtgaggcggaggttgcagtgggccaagatcctgccactgcactccagcctgggtgatggagcaagactccatctcaaaaaaaaaaaaaaaaagtaatggcaaaaactgcaattatgtttgcaccaacctaaattagaaccaaggctgctgttttcccacctgtctgatgagggcccttaccaatcctcacttggcctctgcccaggttcctgggagaaccaagagatggctccctctctctctggccagcacacggtaggacctgctccagtggcttggtgcttagttcctccttaaactgaaaatttcaaggatctctgtgtacctctattttttttttctggctgtgccggtaaagacggattttaatcacagcctatcgcaatatttcccctgccagtgtgacttgttccattttgaccaaatattttatttacaaatccatttctaatttataccctgcccactttcagaaatgattagaagtggagacaaggtattaataaacctatgatgtggaacatatctattaaaccaatgattggtattcaggctgggatgcagctgcccctggcttccccaagccttcatttctcagtctcactcaattgcaaccactgaggccataaattaatccccacacaaggcattgatcctgcacattggagaaagttaattaaggtcattgccattacaagcagcgatactttctattcttttggctttgcttctgacaagaatttttgcctaaatgtgaaagcctggactttttggaaattttcgtcatttaggggatatgactttcatacacagctagccctaccttactgctacattattattattattattattattattattattattattagagacagagtcttgttctgtcgcccaggctggagtgcaatggcgcaatctcggctcattgcaatctccgcctcctgggctcaagcaattctgcctcagcctcccaagtagctgtgactacaggcacgcaccaccacacccggctagtttttgtactttttgtagagacggggtttcactatgttagccaggctggtctggaactcctgacctcaagtgatccacctcggcctcccaaagtgctgggattataggtgtgagccaccgtgcccagccttgtacttttgacctctgcttccttcaaaaaattctccaaattttcccccgaatatttccgttgtccaatgtttgtgcttctaccacctgccctttaaactttggtgttttctgccaggtctcatctcacatcacaatttctaggaaatcccattcatctccaggacatcggttacctgtgaccatcataagcccctgccaatctctcattcaggtatcagacccggtgtgttgccttgctttctgcagaaactttgttctccggaggttccaggccaccccacgtgcctaagtccaaacctaacccatggctttttttttttttcttttttttgaggcagtttcactcatgttgctcaggctggagtgcaatggctccgtctcagctcattgcaacctctgcctcctgggttcgtgattctcctgcctcagcctcccaagtagctaggattacaggtgcccgccaccatgcctggctgactttttttttttttttaagtagagatggggtttcagcatgttggccaggctggtctcgaactcctgacctcaggtgatccacccacctccgcctcccaaagtgctaggattataggcatgagccactgagcctggccccaacccatgacttttcttaaccaaaccgactctgccttttttgttccctcactttgatgggcaccctatgtacctatgcccccaagccagaagttgctgtcatttcttggactcctatcgtgctcactaagccaagtctcgcagattctgcttctgaaatgactcccaaatccatctcctcattttcgttctttctgtcactgcctaagggctctctgaccctctcgctgtcactggtgagcactgactgctctggagaacactgtctctcaaacattccaagccagctgacatccctcccacacagggcctccttcacttaaacaaacacatgcttactgagtatattcactttccatggatgctgtagcaaataacggaaatgtagtggcttaaaataacacaaacttattctgctagttctggagatcagaagtctgaaatgagtcttatgaggcaaaaatcaaggtgtctgcggggatagttccttctggaagcttcaggtgagaattgatcgccttgcttttcctgtttctggagttagatggcgctccttggtttgtggctgcgtcactccaatctctgcttccatcatggcgtctctgtctctttactttgattctcctgcctacctcttagaagggcccctgtgattactacactgggcctgctcagaagatccaggagaatctcttcacctcaaatccttcacttaggccgggcgcggtggctcacacctgtaatcccagcactttgggaggctgaggcgggtggatcacgaggtcaggagatcgagaccatcctggccaacacggtgaaaccccatctctactaaaaatacaaaaaaattagccaggcgtggtggcgggcgcctgtagtcccagctactcgggaggctgaggcaggagaatggcgtgaacccgggaggcggagctcgcagtgagccaaaatcatgccactgcactccagcctgggcgacagagcaagactcagtctcaaaaaaaaaaaaaacacaaatccttcacttaagcacacctgccaagtccctttttccatataaagaagcaggtctcacaggttaggaagtggacatccacgcagaggttctgaggattcggatggggacgtttggggaggaccactgttctgtctaccatgctgatgatcaacattgcgtgccaggctaggcactgtgctaaactagaataaaacaaggaataaattacagtcctgtccttcaggaactcagagttcaatggcagatgattttaaagtaaagtgctgggttacgtgaggtggctcactcctgtaatcccagcactttggaaggccaaggcgggtggatcacctgaggtcaggagttcgagaccagcctggccaacatgctgaaaccccatctctactaaaaatacaaaaagttagccaggcgtgatggcgggtgcctgtcagctactcgggaggctgaggcaggagaatcgcttgaacccagcaggcagaggttgcagtgagccaagatggtgccactgtagtccagcctgggcaacaagagcgaaagtccatctcaaaaattaaaataaaaataaaaaataaaaagtaaagtcctatgagatttgagatgaggactaagctctatttttctatcttgctcaaattcctacctaaggggtctaaggagtcatgccctacaaatcataatcctcatcggatgggttctatttgaccctatatattgtgacttacttttcaatctgactggcataacattatgagacaaggaaaaaaatatttaaccccaaaatgtatttccttgccatacctcgaaattaccctgcaaagtctcttgtgggaaaaatccacattctatagagaatccatttccccctttgttttccttcctttctttccagatccaggagataatcaactaagagccaggcacccttttaggtctgataagaaacattttagaccagctgcagtggctcacgcctgtaatcccagcactttgggaggcggaagtgggcggatcacctgaggtcaggagtttaagaccagcctggccaacacggtgaaaccccatttctactaaaaatacaaaaattagccaggtgtggtggcacacgtcagtaatcccagctactccggaggctgaggcacgagaattgcttgaacctgggaggcagagattgctgtgagccgagatcatgccactgcactccagcctgggtgacagagcaagactccgtttcaaaaaaaaaaaaaagaaacattttacaatctgctctctctctgaagtctgttatccaagagattcctctgcacagtaaaacttggtccccacaatcctttatcttaacctgaagattcctttccattaatcccaggtcttcagataaactcaaccaattgtcaaccagaaaatatttaaatttacctatagcctggaagcccccactttgagttgccctgcctttctgaattaaacagatgtatatcttaaatgtatttgattgatgtatcatgcctctgtaaaatatataaaatcaagctgcacaccgaccacattgggtacctgttctcaggacctcctgagggctgtgtcatgggccatggtcactcaaatttggctcagaataaatctcttcaaatattttacagagtttgactctttttgtcgacagggagggttcctttttgttgttgttgttgttttggagacggagtatcgctctatcgccaggctggagtgcactgatgcgatctcggctcactgcaacctccatctcccgggttcaagcgattctcctgcctcagcctcccgagtagctgagattacaggcacgtgccaccacgcctagctaatttttgtatttttagtagatacagggtttcaccatgttggccaggctggtctcgatctcttgacctcgtgatcctcccgccttggcctcccaaagtgctgggattacaggggtgagccaccgcgcccagcctcaggagggttccttggaagcatagaaggggcatgtggcctggcactctctaccctacttgttctgcagggcccagctcagacattataaggtgagatgttctccatctcctcagggcaaaattcatgcttctctcctatttgacactttgttcatatttctaatacttacctcattgtagtatagctcattgggccacatgctttgttgattataaattctttgaaagtaaggcctgtattttctgcagaatcatcctgccagctagaatcaccccctccccacaatccttttgccaaatcctctgcacagcagcacacggtggcctcaggacatgctaatgcagtgaataagctcatgaactaaagtgctgtcagagagggaatgggcaggagggacgcatgcaatgatgctacaaaaaagaatcggcgctggatgcatggctcacgcctgtcatcccagcactttgggaagccaaggcaagaggatcacttgatcccaggagttcaagactagcctgggtaacatagcaggactccatctctaccaaaaacaacaacaacaaaaaaaatagccaggcatggtggtacacacctttggtcccagctactcaggaggctgaggtgggaggattgcttcagcccgggaggtggaggctgcagtgagctataattgcaccactaaactctagcctggatgacagagtgagaccctgtctcaaaacaaaaacaaacaaacaaaaaataaaaggtcgtgggggaatccacaccataagaatacttcaagaagcaagaaaagagtacacaagagctcattcacaatccaggtccctgacctcaggtgttggcagccagagtggcttgtccctgagttttgcttaagtcagatcaatgtgactgagccagctgtatttggtacagcagagcccacagctgcacatctctgagatgagacgattttatgagctagaacacatcagctgacagcctttaagaacagagagatttcaggcaaggtgcagtggctcacatctataatcctagcactttgggaggctgaggcaggcagattgcctgagctcaggagttcgagaccagcctgggcaacacggtgaaaccctgtctctactaaaatacaaaaaattagccaggcgtggcagcgtgcacctgctgaggcgcactcggaaggctgaggcaggagaattgcttgaacccaggaggcggaggttgtagtgagccgagatcgtgccactgcactccagcctaggcgacagagtaatactccatctccaaaaaaaaaataaataaataataagatttctagaagtataattacactagatcacagtttatttttttccaaaaaagttgaccttccactctgttagctgagccagcccagcaggaattgtctgtggtcctcgacagccacactgagacttgattcgtcaagatgaagcctattccctcacccatctcccaatcatcttctgttaattttgtcccaagttatacaacttgctttaaacctggttctaagtctaagaggattgaatctgcaaaacttcgtctaagaaaaggagcctagagcacccacgtctgtttagctttggaaaatcacgcacatccctgaattctaaacagatggaagacttaaccagcaggtgggtttggggaccaggcatgaagacaaggccacctactgctgtgacttccggaccttccatttaggctcccgtgtatcttttgcctataaaggaaacaaaactcagaagactaattggaacatttccgagtttcctttgcaaggtctccaaaactttcaggcactcccctcctacatccaaaatggcttgtcatcagtgtttctgttcaatctgggagcaaatgacatcaaaactccatcctcccacggctccgtgtgcaggggagcatagcatgtgagccgagtgtccagctggccatgcctaccttcagagtccttcactggctcctccagatcacctcgccagcaccactttgttctcagggaattgcagcacaatttcctgaaacaaaggttcaaatcaatttgcagagcagcagttttaatgagctaagagtgggataataccataggttttgcaagctgcagcttctattcaatttaattaccttcccttgtggatttcaaatcaaccagagcttcagacaaagggggaatttcatcacattcccagaacactgcatggcaggtatatgcctacagaccagaatgtgctaaagtaggcagcatccatcaaaactgacataaccatggtgaagctgtcaggtgaagggttctaacagtgataccaggcaagacagaaaatactcatgaatgctaacgctttgtcactgctcggagaaccatgtggaatgggcagagacaacaccggacaagacagcttactcctccttcatcccaagccatcactctcctgccaagtgttgtcataaggccacactgtgtgggcaaagaatgtcaggcaaataatgtcaacggggaggggagagcatctttaagctcttctctcgatcaaacccccagatccagttcagcaagcgttcatcgaaagcctgccatataacaggcacagagctggtgctggtggtttagaggtctgaggacattatctctgcttcccaagagctcttagactcccaactataacacaaaaatggtgataagggagatataaagcttaattgcaagcacagagacaaaagggctaattccacctgggtagtgtgggaggtgacattgggtctcgactaatcagtatccctgaggagtgggagtctgagagctgatgggcatgctccaaacaaaattgagaggccggaagatcaagggtttgttcagaaagtgacggtgactgatctgctacaacctggtatgtgcaatgctcaggaacatgccttgggtgcctcgaaatccagctaaaaaatgtaggatgtgatggagagccactgaaggcttttcagcaaaagagtggtacagtctatttcagaaagggaaatggctgcagttggtagcatgaactgaaagtgaggcaatgcaatcaacacagggctcttcaaatcttaagaggatttccacccattagggaattgatttgttaggacaatactatgtaactcgagcagcagagtcaatttcagactaagtgctctttggctgttcagagctaaccacaggaatatctggatgctccagtttaaaaacggctgggatgccagcactgcttctgctaaccagcttttgctcttcatacttgacctgcactccacatcgaatttcccatcttgcagttttgatgaaaggaagtgattgttttatcaattacattttcacacgaactttcataccaataccattctcagaaaaatgcttcaaatagcatcaatatggcatagggctaacacctgcggcagtcacatctgcattttcccagtgacagtggagccttggggttatttcatctagagcagggaacagctcaaggagtcccccaaatccatttgatttatatggagagaagtttttatttcttaagtccagatttgattgtcatatcaaatcatctcaaagcgagatacctagcttaaaatggattcaccgcaatgagtacaaatggtacattgtccttaggaaaggctgaccgtcccatctacttacatttacaaacttgaagcacagtacattcaagctagatttatggtgccacattaataggatgttaaaaataaaatagccagggcacacaaagccttctgtgacctgctaatgcttctcaaaatcacatcatggcagatgcaaagaattatttccccaagaaaaacaagaccttgactcagggcaattttctgcacaaccagcatttttttttttttttggattgttgaattaatgtttggcacgcattactgtgaagtgcatgattatacctacataatatatcactacaaactaggtttatgagttctcaaataaattctgggccgcattaacaactaagtgacttgttaagagtaattcaggataattttcttaaatttgtaagatatttgttgaatgactgtttgaaaagggcttattttctcactgaccactggagatctttaaactttcaggtaacacgtttaagtcttaaaagcattactgctgaagttaggggatttaagccaagtcacaaatgtctggaaagtagagttagaactttacaaattcacactgagttctcagttacattcgttttaccatttactattaggaataaaatcaaagggctgtgcttaacttcagtcagacctttgaccttaagggcagaaggaagcagagaattatagttcacacataataaacacatctccaaattattaaaaaggcattttattataaatacattttagttgtagcagtaaaatacattttgttaccatgaatctttgaaaacaaaagaacttcactgagacaatgagcacactgtaggaactgtagaccccaagttgaaaacttgttctatggaaccaaagtagctaacgtaattccaaaactaagttagaaaagataaagacaaagaaagaagaaaataaaaaccctagagagtggctttggggttattttatggtacaaagtcacttttacttttaaggataaactctttaggtattagagcctcttagatgaggtatcatttactgcaaagaaaaaaaattgttataattttgccataagttatgcctatttagatggctgtataactggtactttgaagagatgaacctgaccacctcagttttgtacagcttccctcaggaagacttcccaaaataagactcagtatgaatttgctaagtaactgatctatgaagttagctgaacaagtttagataagaactatatgtatgaagcattaaaaaaaaatcctgtgtcactaataacaggaccctttaataaaatgcaaaactcattatctttataatttagaagagaagtattttaatcaccatatttacctaggatacaactactacatatagccagtacctttatggggtttaaagaatcaggtcagatgactggcacagaaatcagatacagtacaatgtcatatacatggatttataggaagcaggcatggtctggatttatgaaaatccaggacccttcctctgtaaagggggaggctgagaaacattctcagctgcactgacactttgggacttcaaccaggacaaagagccctctgacctactgaaagatataaagaggtcttcgcatacaagttatcgtgcaaagcaaagtgtaaataaaccgaagctcccctctaagttgggactgcataaaggaacccaggctgaaaatataaacaatcctctccaaaggtgagcaagccttttcagtaggaaggactgtgtcttaagaaaactccaaagctgtatattctacgatggtcttcacgtgtacttttacacctaagtcattctgtattctattaccataaaaatagcttttttttgtctttctagtagctcagtaaattcaaaggcaaactaaaaaccagaagcagagcccagtaccccccaagatgcagtccagataaaacagcaacaacacacaaattaaacaatacccaaagacctgacaggtttattatattataggcagtttctttctcaaaaataacttgctcatacatgtgcacctatgacttatgaataattcatgctgtgtaggtggtagatccccctaggctgttttgcaaacacatatagatttttttaaaggtagcaaagtaatcagagacatttattttctgccatatgtaacacttcaggctctctctaacacctgctggcatggcagagaatctaaaataactttgttaacctgagaaacacataatttgaaaaacaaatcctttgccctcaccaccctcccccacaaaaaaaaaaaataataataaccataaaaactaaaacatttgccaggcgcagtggctcatgcctgtaatcccaacactttgggagcccgaggcgggcagatcatgaggtcaagagatggagaccatcctggccaacacggtgaaaccccgtctctactaaaaaatacaaaaattagctgggcgtggtggcgcatgcctgtagtcccaactacttgggaggctgaggcaggagaatcacttgaagccgggaggcggaggttgcagtgagccgagatcatgccactgtactccagccagggcaacagagcgagactctgccccgaagaaaaaaaaacaaaactattattttattatttaaggattatctgtggttttcgatgctccatgtcactgccatcttaggacagggactcctgcacttagtgcctcgatacatgctaggtgcactctcatggcattctgatggcttctttccaggattctcacttccatgcatgtggatcaagattgaccctaagcacaccaaacaaatgcacagcttccagactgatgtccaggcagcagcgtacacaaaagcaaactcaccctaaaaccaaagagctccttcaccctactgcggaagagcagtgcagaccccagcaggggtgagagtgaggaggggtggtggccaatccaaagggcctgtcgctccatggagacctttctccacaaatgttccagtcatggcaccagatttataaaaatgtctccagagatcagttttttacactgagtaaataaatacatggttgaaaagacgttcagactctgaaggtctctgagactttcaaactgcgagaatcagacccagtgattttcaaagtgtggttcctggactggcagcatcagcatcgcctggaaacttgttggaaatgcaaatcatcaggctccagaccaaaatcagaaatgctgggggtgggtccagctatctgaattttaacaagacctcgaggcaattctgatactggctgaagtttgagaaccattgctccatcctgttcacaattctcaaatcttaaaacaggacagatctgtaaatagtactatgtgacttctactctgtgttgcaacctatgtaatttgccaccctttcccctttacttctcaaacattaaaaaagtattaatgaaaacacttcataaaatcaaaaatttcttaaaaggtaatatcgatttcccctcctctacatagttctaaggcaggcaatcacatgctagtatgcaaagtaaaatacagaagagacctcatatatgaggtagaaacagttaaaaagactccccacgaacataatgaaaatttcataatattgtttaatgaactcatagaattatataaaacttactatgctttatgcttaatatctgtatcaaaataaaatctctctgttgaacaaattgcaaataaagtctggtctaatactctgataactgaaactatatgaatgtctctgggttttcttaacactccagttttagacgctttagacgaccactgcggaactgggtttggtatttaaccacagttcacatttctaagtctagattcttctattaggtacctccctccaaaaaatttttagaaactctggtgactgtttccttaaacttcactccaaagtagacattctcaattggttcaaaaattttaaacgttacattaaaattgtttttaaatctcttgaatctcatattctagtttaaagtaataacaggatgtgtttagtaagattcactccttgcaacaatggtcttgacattactgattaaaaaggtatgaaagtagaaagtgtgaatttagcagctttaaagtctcagctaataaatgtccatcctcaagcagatgggaaatgtgaggagcatatcataatgagcattttcaagactaacatgccagttactctttcaagatggagatggtgtctttgtaagtgattggcaccactacgtgatattttgaacaagaaatcgtagatagaacattacctattctttctaatttctaggcggtttgaatgtggatcagatggcaaagagtggagacaaatcagatccattaagacatttataccttgagattcaggaagacatatagcgcggcagtagaaattaaggattttcatatgttaaggggatggtgagcaagaaataatgtacggtaaatcataaaagacaaattactaccattgaggagctggagggaaaaaaaaaaacacaatggctagcttacatgacatttgaaagcaccaatttgtatctttcaatacatttaaagttttaaccttgtatttttatagattctttctgggattccctttttaaaaataactccactataaaacaatgctatagaaggtgtctgtttttaaatgagtatttcagtaagtctaattttcttaataacaatggttgaaatactaaaatttatcttgaaattgttcttcacaccctgactcttaacaaaggtggctcgctctagctaagggggctagagaaacatcttttacgtctgcagctttgctcttgacatgaaaaatattaaacacataaaatcaactacactagagcaacacaatactatatattaattatcccaaagttgggaaattcattagctttctcagcagctccaatgcctccataaaaaaggagagtattttcataaattggtcttagatgttgctatgtttaattaggtaatgcttattcagtgggaattctgcttattttacttattctgcagttctctgaactgaaaagaccagttgatgtttacattaaacctaaacttattctaaaatctgatgatttaaaaaaaaaaaaaatctacacaaagcagtttgttatttcacgtgtaaaaaatgacctggatagaaagcacatctgtgtgaggaaaggaaaattaaggtcatgttagtttaaatggtcaataattaactactgattaatcaaaaacaaagttctgctataacaatttggcaaagcatatgcccaaatgacaaccaaaaccccctttaaagacacacaagaaaatatccatgttacacggaatgaggttcttcaaatcgtaacaaaagaccatttttagatcatgaaaagaattttttcagcatgaaggctcactttacaaactctatcatccaaaatatcgtctttcaggttaaaaaaaaagaaaatctcaagtagcactgaaattaaaaagtgaaacaaatattctggcaagaaaaagaaaacttcagagtgatacaaaggacaaagatgtaaaaagacattatgtgaacaattaacctcacttagaaaaaaatctgctctgaagaaatggaagctggtaatacttggtattatctgagagctatcatcaagttttctggaaaaaaattttatatacatatactatacatatatatgcatatataagggttgaacctagcatataagttatgtttcataaatctgatttatgggtacttgctactactactcaagtaatacccaaagaacatcagctgtactcagaagacacgcctcattttgatggaaacttgcaatgattcttacacaagacgtgttcaaaatgttataagatactatgcgtaaagagcaggttctttaaagcatggttggaaagatggcattatgtaatgctgaggaagagtaagcttgttgtaagtcaaaataagcatttgatgcagaatctaagaagagtatcagatggaagcagcgttagaatccttgactggctatggaaataaggaatgagaagtactcatatactcacagcagagcggtgggccaataagtagctattatttttagtttttagaaataactgcttagaacaaggatgtcatgacaacttaatagcttccttatccaaagcttccatcatcaacatatttatataaggtgatggggtgcatacacgaccccatgacccttaactaaatataaatataaataatttaaaaactgatattttttaaagattcaagtatagaaaacagaaaattaggcaataacctcatgacaaggggtcaactgaaagccctgacttgacaattctgtcttcatattatcagattgcttttgaacatttatctagcttgcgttgtagtcctgtatatgggggctggggggtggataatcactgatgggaaaattattttccataacatcctcacatcagagagatctaattttcattcggatatgtcttgagttttgtcacagacttaaaagcacatagctacgtggcaaaactttttcttcttttcttcctactaaagaatgttgagtaaaatttgacattgctaaatgtggtgatctgacatcatacagagaaagagtggtgctgtaacttgccggctcagttttccagctgtgatttatgctaaccattaacacgtctgcagtttacaagtctatgtctgccaccttacacagagacccacagcctggaacgcaaagccacacacaaatgaaccgcactcttagcagaaaggtagagctgaatacaagaggcacgcagcgcttatcctggagcttgctaaccattaaccaaaggcactcttttatcccaaactgtctgaggattaaaaggggttgtagctggccaacataaactaaactccaatcatagaagaaatgtcagtaatttttctttacctttgccattttacaacctgattttaaaaatgtactttgattataggattgcctatcgaaagtggtcttccaaaaacctgtttttgaatggatcatcaggaagattgggttcattcgaaaggttccccagcctcatcttatttttttttaaaagtttatattgtagtttcgagatacctctgaaatataaaagtagtattacaaggtcaggaaaataaggacatatattgctttaaatgtgtgacaagaccataagtttcaagagggtaaacatcttcctttggattttaccaaaattcattcaaagcaatttttagatggtagaatatttaagatggctatttaaattttatattgtgtacaagttcaataaggggtattttagaagaattgaaagacatgaaaaacaagggtagttttctgccccagattctgatgaattttgatacatttttgacaaacattatatttcttctttaatggtgttcctcaaacaagacagctagcaaaatatttgaattgccacgtataatgtcacattttaatgtaaacatcaaataaggtaccaaaatttttactggagagaaaaaaacccaaaccttaaagcggcacaattctttataccactggagaagagggaagccaggttacaaacatttacacatgcatagtgagaaaaaaagaattttactaaattcacgcatttttaaaatagttatcaagtctactaagcaccaacaatcctaaaaatttttcagcttcttgatttgtttaaaaaaaaaaacacacactatcaaattaacattaaaaacaagcttgaagtgtagcttgtccaaaaaataactaagtatgccaacgtttttttcacatttcaaaaaacagtggcatacaaaatatgcctgcaaagaatgcctttaactctatcctatggtggatggagattacaacaacacatcatacatagtctaaaactataaaagttttagaatgcagcatcgtgtcaccaaaaaaaaaaaaaaagctgataaaacttatttagaagatgctgcccctttattttaaaaaaaatttaaatgaatttaagcaaaaataacatacatttgtacatcaactggccatttctggtacagaaacccagcatgtggtaatattattgaataaatgtaaatgctacttacaatttttttttctttttaaatacattttagacaaacttttctttttttttttttttttatagttgcacaattaacctcttggctgctagcttgatgcaaacatatgtaacaatacacaaatttaaaaatttttttattctacataaaagctgtcaaagttttgacacatcaaaaatgcaaaataatggaatatactttaaaaaaattagttgcaagtctagcagcaaagcaattaagtgagaacatatttaatattaaaacaaagggaactgtgcatctatagatgaagtccaactaccttaattctactgatacaaacagaaattaaaacattctcccttgagggaaaaaaaaagtgattatttaaaatatgagtaaaagccattgctgccagatgagctccctaggctcagttcctggaagagagacagagggtcgctactcttcttggcctgctcaggagggggcctgggctttggaggggcccgcagagcgctggcataggacatggcgggcttgccccccgcagagctctgggggctactgctattggccgactccgcgatctgcttgttaggcataaggggtggaaactggccaagatgctgcagcacactgtagttgaaggaactggacacctcgaggttctccgacttcagttgatcctcagggggtttgacagtcttgggtggcgctaaaagcagagaacagtgacacagatttaaggatgagcccagcaatgttcatgtgcctcattcactcagtgtgtcagaactggctctcatctccaggaactcaaggacagtatagccacaaggacagacaccttctgccatagaatgctgaaatcacaacacatccaaccaaacgtccctatcttatagacacataaaacagccatgagaagtggaatagctaacatataaaaactaaagttcaaatctgaaggcttgctgaaaaataaaaaactagtttgtgtaactgtacactttgatatttattctagtaactgctcatagtttgtaaacaggcacatgctctctcttaaataaaaaggagctgcatatccagactcttggtcaaaacagcttttattactgagctaagtaatagtgccatgggattccatttgtttacaatgctacccttccttgtattatatactgagtaacatggaataaggggtgcgtgtggagactgtaaatgacttcacatttcctataatgtgcctgactttcaaggtcccttaaaatttgactccatccttcctaaccaattttattgctcactaaaccatagcttgctttcaaataactgcttttcttttcaatcttttaaaactttatgtaacattgtactggattataaacataatacaaattcactgaggacaattggaaaatttcagaaaagtccaaagaagaaagtcattcatacttctaaataccagagataagccttaagttgttgttttatttttccctaagtacttgatttagagtatttcataacttacttatgtaatgtctcatttttagaaattttcattatcaccaatttttctcttctctagaccgtgatgttccaggtcaatatttctaaatattcacggctccttcctcaggataagtgcctaggtgtacaatgggatgtacgagccatacaaattcatgtatttcacagctatttcctcaggataaatccctaggtgtacaaagcttctgacaactgtggccaaaccactctgcaggaagatgctgcccatgtgtactcagccagccatatttgcccattgccttacccaatcacagcactggcatgataactgtttaaaagcttagcctattttattaagtaaataattatcttgttgtggttacagtttgcatttccttgatagctggtgtgtatgaacagttttccttgtttattacctatttgcagactacctctgtccattattctattggacatactattctattgttttttcctattattttgtaggcactttttacatatgaagaatactattcttttgtcatatgttgcaaatatttttacctgttttgtgatttcccttttaatgttatttataatgcttccactttgtcagcaaatgttttagattttactaagcaaatccatgaactagtttctatgcgaagtcagatatttacatctttttgtgaatctttaagggtttcctgttttaagttaaaattttataatctatctgcaatttattttattatgtggcataaggtaaagatataactgttcatttatttttcccttgaatggttaattaatcatttattgaataatccatcccttctatactgatcatacttttattattactaaattcttttgtgcattgaaatctgtatctgggctttctagtcttcctgttccactgaaccgtgtttctatttctgtatcagtattaagttttttgtggccctataataaattgtgttctctgctctttgaagtcctccttctttactttcctcctctacctcttttcagataaattctggatattctcacagaccttctatttaattaaacaggcaggtgagccatgctcagtctgctcttcctgctttctcacaggttgcttctcatatctggaatttgcccatttacccatccaaaaccttaaactgccttctcaatccaataaatatttattgggcacttactatgtattcactgctgtgctagacccatgaaagtatacagttggttagagcagccctttgtaaacttatcattttattgtggaaataatatataatattcagtcatggcatggctaaataacaatagaagtggaacaatgaaggctgatatgtcctaagggagttctgggagagccaggagggaatctacatagagaagatgaaacctgggatgagtcctgaaggatttaaacaggtggggaaagactaggagggcacaggagagactagtaacaatctctcggtttctgtgctttccctgcttccttttaggtacagaaaccccacccatcacactaagcttaaattggacacgtagttgctcagctagtgactacatttcccagcttcccttgtagctgagtatggctaagtaactaaatttggcttaattagatatgagcaaaagtgtgcatgcaatttctgtgtcatctctagcttgaagataagccacttgccttgaaacactgtcatggcagaaacctagctttgactatgcaacaaagacaatccttcagaggacagtgggacacagtagaaggaccttgggcccttcaatgactttgtgaagcaaagctactcagatagtgtgaactacccaattaggtaaaagaaaaataagtttctatcttatttaaggcactgtactttggggtctctttgggacaacagcttagcccttaccctaactgatacaggtagaagaggacaagaatgggaagcatttcctcattagtctcctctgaacacggtaaaaggttaatattagacaacagagggcaataacaacagagaggtgagttagttcctcttgtacaaagttttctcccaactattccaccatctttaagggtacagtgtctaaactgcacatttagcacttggttttatgtcctttaatattgattgttattgctttatgtatgttaatcttatttcccaaactagatagctccttgagggagaggaccatgccatctttttcactgagctctatgagtatggcactctgcttcttgatggccctgtggttagtgggccacagaaactgtctcttccttccttgtgttcatgtctagaaggaagtgtcccattggaacatacctgatttagattgggctggatttcttttcccagaaatttctgtatgtgtatgtggggcggggcaggggggtgcaggtacagacagagagggaaagtgagacctttagctagattactttggaaaccaaaagacacttaaaaatacatagaagagcagagtgatcagaagaccaagagcagagtgatcagaagaccaatttacaaggaaaagcaggacgaaggagcaggtacacagaggaagccataggccctggagggagatgctgagaccatcacatctagtggctatttaccatgggccaggcactttgtgctatgcaccttccatggattaaacacagtgaccagaaaactatccggctcccctcatcaacccagctggctccctggatcttatttccagtaaaactgtttttacctgagctactttgggttggtttctgtttcttgcaatcagatgtagcttaagacaatcatcaaatagaatgaactcagacatttgatcttcagatatttagtgaggtagctctatccttgagttcaaaataagtaaaaaactgaaaccacaagaaaccccactaatatttctttttaaaacccaaaccacaatggttcatttcctctaaaacacactagtgacacctgatggaagctacttcacactccatatgacaaagtttcaaaaccatgttaacatcagcaatacagctgtccaatataacataaaactagaattcagaaggtgaaaatatttcacgttttagctttagtattttatttattcaatatgctaattttatagtactatttaaaaattttaaaaattcataaaattcttcaaaatgattttaaagcatttaatatctttctagtatatttatcacttttccctttaaatgtcactgattttgtgaataaaacaatggctttcaagaacaattagtttaacaaatatttcaatataagtgttttttgctgtctaaaataatatataaaataaacatggctttcattgttcaagaacttactatttttatttactttattaagacttatttaaccatgttctcagttttatagcaatgtaattagttttaactgttttttttttttgttttttttttttttgagatggagtcttgctctgtcgcccaggctggagtgcagtggtgtgatctcggcttactgccaccaccacctcctgggttcaagtgattctcctgcctcagcctcccaagtagctgggattacaggcatgcatcatcacaactggctaatttttgtatttttagcaaagaaggggtttcaccatgttggccaagctggtctcaaactcctgacctcaggtgatccactcgcttcggcctcccaaagtgctgggattacaggtgtgagccaccatgtctggcccagttttaaatgtttttaattaaataaatacttagaaaataatagtttagaggcagtttaacctaatgcctacatccttgtctaaccatgaatacaagattgctactaattaatcatgtatatattcccaataagagaaaacattctctgaaactatgaatttcactagtcttacaactaatatttttcaaaatacatatctcagccgggcacagtggctcacgcctgtaatcccagcactttgggaggctgaggcggacagatcatgaggtcaggagttctagaccagcctggccaacatggtgaaaccctgtctctactaaaaacacaaaaattaggcgggcgcctgtaatcccagctactcaggaggctgaggcaggataattgcttgatcccaggaggcggaggctgcagtgagccaagatggtgccattgcactccagtctgggtgtcaagagcaagactgtgtctcaaaaacaaaacaaaacaaacaaacaaaaaacacatctctaatctaaaattttcaacccatgcattaaaagaaaatgtctgctaaagtatgtcttgtcaccaggtaagtgaacagaaaccaaacatacctgtgttggaggagggattccccaccctctgcagtgcaactgggtcacccccttaattgcacagaatctagtttcattatctcctttctccacaagcatttactaagagcctaaagtgtattcagtgtcaaaacgggaaattcaaagtttaaaaaggccaaagatggggtttctattttaggcttacagtttaattgtaaactgatatccatatcaaacacaatcatctttttaaaatttcaaaccaatataatataaacagttttcttcaagctcaagaaataaatctctaacttcagtaagaagtctctcatgtgattattttatgtctgataccactactacaattctctaaaaataaaaaattgataaacaagaagttgtgcttcaggacactcgtgatttgaattaattttttaatgctaaactaagtgatactttcaatttaaaaatactacactctgtctccaagcaatgaagaaaataatgactttatatttgcagaaaagataccacaaatgacatgagcatttgctcaggaactttctaccttatcagcttgggtcagctttttattaatttcagcaaaaagctatcctaaaacttaggttaaaaaaaagaaagaggccgggcgcggtggctcacgcctgtaatcccagcactttgggaggccgaggcgggcggatcacaaggtcaggagatcgagaccatcctggctaacacagtgaaaccccgtctctactaaaaaacacaaaaaattagccgggcgtggtggcgggcgcctgtagtcccagctacgcgggaggctgaggcagaagaatgacgtgaacccgggaggcggagcttgcagtgagccgagatcgcgccactgcactccagcctgggcgacagagcgagactccgtctcaaaaaaaaaaaaaaagaaagaaaaagaagaagagaaatgatgttatcgtaaaaaaattataataaacaaaaccaccaaaaaagtaacaaattattatcactgatttgtaatgtagatgtttgccaggaaattcaaatatgataacatgagtgagtgtatttatcctagaccctgaaagtgacaaggcaggctcacacctgtaatctcagaactttgggaggccaaggcggatggatcacttgaggtcagcctggccaacacgatgtagccccgcctctactaaaaatacacaaattagctgggcatggtggcagatgcctgtaatctcagctactcgggaggctgaggcaggaggaatcgcttcagcccggatggcggaggttgcagtgagctgagaatgcaccactacactctagccacggtgacagagcgagactctgtctcaaaaacaaacaaacaaaaaagtgacaaagcagccaggcatggtggctcatgcctgtaatcccagcactttgggaggctgaggtgggcagatcgcttgagtccaggagtttgagaccagcctgggaaacatggcgaaaccccatttctacaaaaataaacacgaaaattagccaggcatagtggcacatgcctatagtcccagctacttgggaggctgaggcaggaggatcatttgagcctggggtgtgaaggttgcagtgagccgagattgcactactgcactccagtctgggtgacagagcaagaccctgtctcaaaaacaacaacaaaaagacaaagcaacccgaggcaaaatacagcggtttactcctaaaaggtaccaaagaatgtttaaagattaaaatgacaatgtcttttgccaggaaataaaagcaaaagcttttaaatgtttttttttaattttttttaccatgtctattgttctaaaaatatgctagcatggcacatactcaaaaatgggccagttacagaaacaacagattcacattctaaagatgaacaaaatttgtttcaaataaaaaagttgatgttactgggcaaaaattcaccacacaaagatctcagacttgttcacaaagatcaacgtctacagcatacaaagagaaggaattagagaattcaagcagtataattagtttctttacattcaatataaaaaagagaacagaggaaagatcaaagcgcattcatctttaaggctaaagaggaagactctagattttccatcatacaagtttagagtgtcttatccattccgatccctttctatgccttttttgttttttagccatgaagttctacagtttattagaataaaggaataaacaaggattcttaaatctcaaaatgtcagactttactggtctctctcgtggccaaactctattatatagcaaattgtcaacactttactgacaacaaatccttgaaaacattcatctaaccagctcccactcacccccctcagccctgaaggaaaaaaaccaaaaagcagaaaacaaacttttcccaaacaaaggtgattctatctattcagaaacatgttttaagctccatttcttctttcaatcacaggtcaaaatgatcagtttccaaatatggatatatctactaaccttctggacataaaatatggaactggccaggtgcggtggctcacgcctataatcacattttgggaggtcgaggcgggtcgatcacctgaggtcaggagttcgaaaccagcctagccaacacggtgaaaccccatctctagatacaaaaaattagccaggcgtgggtgtgtgtgcctgtaaccccagctacttggggggctgaggcaggagaatcacttgaacccaggaggtggaggttgcaatgagccgagatcacaccattgtactctagcctgggcgacaagagtgaaactgcatctcaaatatatatacatatattaatatatatatataaataaatataaatataaatatatatatatatatatatatatatatatatagaatcaatatagtcctaaattgcacacctatgagctattagcatcattaaatattgttcaaagatgataatgcaaattgggggcaggtggtatagaagaaaaactccacagatatccgggagctgaggagtacagattagttttagccaccaactctgtcttacctatcaactctctgggctgagctgtcctgctggatccattgcacggaatgttctgataaggagtagatgaggtggtgtttacccaggactccggggatgaaaagttgaaagaagattggttactgtggtcctgaagctctttacactgagccagactgtcttgaggagtgcttacttcttcagaacaaggttgaactgagctagatgagattcttctttggtacaagggccgaccaggtcctctgggctcatactacacaaagaaaaagaacatttcataaatcagtgcaccttgtgccatagtcctctctcttttcactccatagcaatatctcactatataaagtaaaaattgtcaagaatatactgtgactgtgaaaccctccctccaccctactcccaccaaaaagaaaaagggcggggaagggtacaggctaggctctggacatggtgtcagaagacctgggctcaaaactcagttgtgttcctcactgcatagtcctgacaatatatgtctgatttctgattctgttttcttatctgtagaatatgggaattgaagtagttgttttcagttctaaaattctattgacattttagataatagtagattaagaaaaagcacgaaggagcaaatccgctcaaaattaaatgggtaaagtataggcagttgagtcatggccctcttgagcagagtcagctattctacacttatctcttgggcccttccttcataacatcataatttatttttctttagacctgatggcaagatgtgattcctcctgtccaacgtaagtactcttgactggactccactgcatttcttttagtcaaacgtcaaatgacacagcatactcattcatttagtcaaaaaatattttatatgtttgaaacccaattaacttagtatattttctcctccctaaactccctgtatttgcacaacccaaattcctttaacccttccgacaagatctatgtggcagccatgtcaagatttttttatagttacccaagtgctgttcaatttgttcttgccagatacttgtgatcaatattcagagtcaattctaatggcaaggcagtgtagagcagtggttaggtatcagcctccatctaaggctagactgtctgggttagacttcaggctctgacttttattggcagtgtcaccttgggcaactgatttaacttctttgtaacatgaattacccacagtccccatatcttgggattgttgggagaattaaataaggatgcatagcatgtacagcagttcttggcacacaggaagggttcattgctatataattattttaatgtaatatataaagataagattccacgttccgtctcaaatgacagaatgggattggtgtttcattgcccctttctttttcctcttttcttttttggatagcaaatgataaatctgctgttcagtctgtggtcagttatgactctcagaaattgtactttcaccactgttgttagcaataattggaaatcaggaactggaggctggattaaaaagaaggcagagagatgaactggcataacaataacaggatggcttctggaaatataaaatagcacaagcagacattatcaagccaattaaatgtgaaaattgtgggggtaagcactgagagtattaagttaaagtaaatggaaccactaggatgtaaactagggaagaaaatgggtctggactggctgcccttgtgcggagaggcaggaaagccgtgacgagagcaattctctcgctattaagttttgagtgcctccatttccacagtcttagctattgaatggaggaaggcaagaggtagtactgccatctggttaatttcttttttcatataattttatagatctgtttctaagcacagtatctcaattcatctttaattttactctgctttaaaggcaattgttttcaatggtcaaatcattatgaatttgatttggttttctagaatgttaaccatccaaattaatttagtgtcaactaggaatgtaatcagcacaattgaaatttctttgtctaaggcattcaattacggtagtgagtagaataagtaacctttctaaactgcactgtgtgctctatgcctgacaaccctggatcacaatggctgcgcagcgtgtctttttttttaaatcaaggtttgtaatgaagacaattagctcttaaaattgaaatgtagtatttctttctatgactatcccgagtgtttagtcacaatcttcaggggattacattctaaagttttcatatgtgaatactaaagtacaaaactaacgttgggtatgggctcagaaagagcagattatgataaccatgtctcctggtgatacagaacactaaatatactctcatgaatttcaggcgttaactttataagccccttttcattaaataacgaacatacacaaaccagtagtataaacgataacctttttacaatgaatagacatatgaaccagaaagcttaaaggaagaaaacgaaaactcagaaagaaatggaaggctgatataagagagaatattcaattaaactttacagaaaatttatatcatttgtatcttccaaactgaaatccaaaataatcactcagttgacatgcacagcaggctccggggaagtattgtataacctatctacagctattgacagagataaacatgtagataaaatatgaaattcaatttcaaattatgttatgaatatgattaattttttatgtcagaaaagcaaaaccgaaactggaaaattttttaatgcttttaaaattagatctattggagattttatatatatatatatatatatagagagagagagagagagagagagagagagagacagagagacagagagagagacagagacagagagattgattgatttttgtgtgttgaccttgtatcttgtgaccttgctaaattcacattagttacaggaatctcccaaggaattgggagattccttgggctttttctatactgacaaccatgtcatctgtgaatggagacagcttcatttcttccctcccaatccctaatgccatttattttcttgccttattgcactggctaagacttccagcacagtgttgaagaggaatgttgagaacaaatgtcttgccttattcctaatcttagaagcactaaatctctcaccattaagtatgatggtagctgcagaattgttatagatgccctttaacagggtgaagaagttcctttccatttctagtttaccaagagtttcatcctgagtggaccatgcattttgtcaaatgcatgtggtttctatgtctattgatatgattgtgtgatttttctctttagattgttagaatggtgtattacattaatttattttcaaataccacaccagccttgcattctagagataagccccccatgatcatagtatattcttttcatatattgctaaattcaaatggctaatgtcttgctgaggatgcttacattgatattcatggaagtggatctgtgattttctctgtttgtattgcctttatctagttttggtatcagagtaatgctggccatatacaataaattgagaagtgttctattctctggaaaagattgtgtaagttggtggttttcttcttcacatttttggaggaattccatgctaaaaccatttgggcctagagatgtcttttttggaaggttttaattacaaattcaatttctttaacagttataagactgtccatatgccatctatttcatctttggtgaggttttaaggaagtggttcattttatctatgttgctgaatgtatgtgcacagagttgtttgtagtgctcccttattaccatcctttcaatgtctactgggtctgtagtgacccagtctccttcctaatataggtagtttgtatcctctttttgtctttgtcaatcttgctaaaggtttatcaattttactaatctttccgaacaactaactgggttttattgattttcctttattgcttttctgttttgaattgtattgaattctgttctcatctttgaaattcccttccctctgcttgatttgaatttattttgctcttccttttctaatttcttggggtataagttttgattattgatctgagatcttacttcttttctaataaagcttttattaaattctaatacaagctataaatttaaattctaatataagctataaatttccctctgacatggcttgagctgcattacacaaattaggacaggctatatttccattttcactcaatgtaaaacatttctaatatttctaatgaagaaccttccattggtcaaagataggggacaaggtgtgaaaatgtataaggactacaataaagtaaaaattcaaatacataatgatatcaaataataatattcaaagtgaaaaaagaaggggaaaaaagcctcaatggtcatcctgaggcctgctaaggcctcaattcattactctgaaaattgactaataaagggcaaggattaaacatttatccttccctttctacatagactatattttaggtagtaattaaatattcaatgaggaaaagttctcctttataaaagaaaaataaatacaaaagaaattcaaagaagttttaaataatcattttgccattctaatgaaacaatagatctaagcaacaaccatcaacagctgctaaaatctgaaaggttgctagaaattttaacgtcaatagatcagaatgacatcatctgatcactgaaacatactgatcaacttaacatagctaaagtgggaaaactggatattatgtacatctttaaacatataatttaaaatgagacattacatactgcctggtaatttttcactgaaatatcataggtatctttccatgtcatggacactcttataatatcagatttaataagctgcattttttttcttcatttacttaaaactaatctatttaatttccccaagatttgaggaagaaatccttgattatagaacacttagggtctactaacttatttcaatttagctccccctcaaattatcattttctgcttaaagcaaatacgctacagtttggtggatcagtacagttccctagagagaaaaaactagatggagcaaggagaggactatcactataagactaaaaataatcaatttattaacaagccagataacgtgtgatgaataaactgtagtttacaacagtaatatctgtgggttcatatctatgggttcatgtgatgtaatctattgaaaagcacttgataaattacaaaatcattttttaaaagcatgattcccagttaatggtggcaactggcccaagactccactaaaataataataaatgaatattatagatatacaacaatcaagaccatgagcctcgtcatcaatagaggacacatttccagaatacatggagactggatggaggaatggtgtctgtggaagaagaatgaaattatagctaccccccaagaagggaaacgattcacctagcagaattccacagaggcttgccaactaatataaaatgaaaggaagatgaagggataaaattaggggggttaaatgaaagtctatacaggaaacagctggactcatactcctccccgcaacaacagtgggacacagccagccaggtacctacaatacagacaaaaagataaggagacagacaagcaaaaatccgggaaaaacgaagggctccacatggattcaagcactaaaaagtccccagtgaaaggcctgccaggcaatacatcctgtgatatacacaaaactcccaagttgctttttagtgaaagataatcaagcggccaggcgcagtggttcacgcctgtaatcccagcactttgggaggccgaggtgggtggatcacctgaggtcaggagtttgagaccggctggccaacatggtgaaaccccatctctactaaaaatataagaattagccgggagtggtggcgggtgactgtaatcccagctacttgagaggctgaggcaagagaactgcttgaaaccggcgggggggggaagttgcagtgagccaagattgtgccactgcactcccacctgggtgacagagcaaaactctgtctcataaaaaaaaagataatcaaggattaccagacttttaaggaaggtctccagcataaaagatagtcccagatgaacaagttgaaaaaagggaggcccggaaagaaacaatagtgatgttttaaaaatattttagaacattgttttagttcttattaaaaatcaaaaacaaaacaacaacaaaccctctaactggtgttctcagaaaaggcactgcagaaaacaagatgttatgaaaaaggaaaaagctcagaataaagaactcttgtgagtttaaaacctgagggctcaaatattaaatgcaatagttcttgcagataaaatcaaggaaatcttcctgaaagtaagaaaaagtacaaaggtatcaaagtatgacaggaaataaagatttggagaatctaggaggcccaacatcttatcaaaagaagtttcagaaagtgagacatggagaaaaataatgctagaaaattatcaaaaaagattaataataatagacaatttcacacagttgaaggatatgagtccttctctaaagcaatgctgtccaaaaactatttcctgtgacgatgggaatgttctgtgtctgtactgttccataaggcagcgccttgccatgggagctcctggtcagtcaaaatgagcctactaggactgaggaactcaattttaaatcttatttcattcctaatcataacctatccatcaagaattcctctaggttctacctgcaaagtagatcctgaatttatttcttaccatttccactgctaccccacagtccaagccacaatcacctcttgcctagataactatgacatccttcactatttatattatttttaaaactctaaacaaataaattgcattattttcatacaatttctaaagtaattttaatgtcattttagccttataaaactcaatcataatgacagaagcaaaaatttatcttagttcccaaaactatagtagatttatttctaggttttgttgtttcccttaaaagatacagaccaaactcccgcaacatgtaatttacccatataacaaacctgcacgcatactccactgaacctaagataaaagctggaaacagcatgtagtcccagcacttttggaggccgaggtgggcagagtgcttaagttcaagagttcaagaccagctgggtgacacaggaaaaccccatctccaccaaaaaatacaaaatttagctgggtgtggtggcatgcatctgtagtcccagctacttagggggctgaggtgggatgatcgcttgagcctggaaggcagaggttgcagtgagctgagatcatatactgcaccttgcgcctgggtgacagagggagacctggtcttgaaaaaaaaaaaagagagagagagagagagagatacaggcataccttggagatattgcaggtttggtgagagagagagagagagagatacagacataccttggagatattgcaggtttggtgagagagacagagagatacagacacaccttggagatattgcaggtttggttccaaactactgcaatacagctaatactgcaataatgtgagtcacgtaaattttttggttttccagtgcatataaaaattatatttatactatactataatctattaagtgtgcaatagcattgtatgtttaaaaaaacacaatgtataaaggcaagcatggtgtcacatgcctgtaggcccagctacttgggaggctgaagagggaggatcatttgagcccatgagtttgaggcttaagtgagttatgatcacacccatgaatagccactgcattccagcctgtgcaacatagtgagacactctttaagacattttttaaaatgtatatggcttaattttaaaataatgtattgcttgtgattctctggctaaaaaacttaatcacaaaaaatacatactgtattgctaaaaaatgctcactgaccagggtggtggttgctgaaggctgaggtggctgtggcaatttcttaaaataagacaataataaagtttgccgcatcagttgactcttcttttcacaaaagatttccttatagcacacaaagttgtttgatggtattttactcacagaacttctttcaaaatgggagtcaatcttcttaagcccttccagtattttatcaactaaatttatggaatattctaaatcctttgaactcctttgttgtcatttcaacaatgttcacagcatcttcccaggagtagattccatcacaaaaaaacactttctttgttcacccataacaagaaatttctcactgggctcagtggttcacgcctgtaatcccaaaactttgggaggccaaggtgggaggatcacttgaggccaggagttcaagtccagcctgggtaacatagtgagatacaaacaaacaaacaccaaaaacaaaacaaaacaaaaaaattagccaggcatggtggtatgtgcctgtagccccagatactgaggaggctgaggtgggaggattgccagggtccaggaggtcaaggctgcagtgagtcatgattgcaccactgcactccaacctgggtgacgaagcaagacccttctcttcaaaacaaaagggaagaaattcctcatctacccaagttcaatcataagattacagcaagttagtcatatcaggctccacttctaattctagttctcttgctatttccaccacatctgcaagttacttcctccactgacttcttgaacccctcaaaggcatccatggtgatggaatcaacttcttccaaactcccgttcatattgatattttgacctcttcccaacaatcacaacaagaaagcgttttttagcaatacagtatatattttttgttcttaaattttttagccagagaatcattaatggcatctagaatggtgaatcctttccagaaggtttttaatttactttgtccagatccatcagaggaatcactgtctgtggcagctatagccttacaaaatgtatttcttaaataagacttgaaagtcagaatgactcattgatccatgggctgcagaatggatgtgttagcaggcatgaaaacaacattcatgtccttgcacagctccatcagagttcttggatgaccaactgcattgtcaatgagcagtaatattttgaaaggaatctttttaaaaaatcccaccccccctcccccgcccaccagcaaagcagtaggtctcaatagtgggtttaaaacatgggttaaaccatgctgtaaatggatatgctgtcatccaggctttattgttccatttatagagcacaggcagcatggattcagcatcattcttcaaagccttaggatttttggaatggtaaacaagcactggtttcaacttaaagttcaccagctgcattagttcctaacaagacagtcagcctgttcctcgaagctttgaagccaggtattgacttcttcctctctacctgagaaagtcctagacagcatcttcttccaataagaggctgttttgtctacacagaaaatctgtagtttggtgtagccatcttcatcaatgatcttagctagatcttctgggtaacttgctgcagcttctatattagcacttgctgtttcaccttgcacttttatgttatggggatggcttctttccttaaacctcatgaaccaacctctgctagcttccaacttttcttctccagcttcttcatctatctccagccttcacagaattgaagagagtgagggtcttgctctggattacgctttggcttaagggaatgttgtggctggtttgatcttctaaccagatcactcaaactttctccacatcactcaaactttctccacatcagccataaggctgtttcattacattcttatcatctgtatattcactgaagtagcacttttaatttccttcaagaacttttcctttgcattcccagcttggctaactgttataagaggcctagtttttggccagtcttagcttttgacatgccattttcactaagcttaaccatttctagtttttgatttaaagtgagaggcatgcaacttgtccttttacttaaatagaggccatggtagcattgttaactggcctgatttcaatactgttgtgtctcagggaatagggagacccaaggagactaagtgatgggggaacagcaagtcaatggagcagtcagaatacacataacactgattgctcaaaaacaatcacaatagcaacatcaaagattattgatcacaacagataaagaaataatgaaaaagtttaaaatactgtgagaattgtcaaaatgtgatacagaggcacaaagtgagcacgtgctgtcagaaaaatggcgcttatagacttgctcaacatggggttaccataaaccttcaatttgtaaaaactataatatctgtgaaatgcaataaagcaaagtacaataaaacaaggcatgcccatatactgaaataaatgtgactttgcaacacagtgcatcaaaatcaatttgggtctaaattttaaaaaatgccatttgaagcatctcagaggcaagggcacttataatttacaaatagtattttcctaccaagcaatattattttcctatacatccatatacaaggtcatagaagggataccagaacgaatacaatattacatctcagagaaaaacgtcaggttcactgctgtgacatttggagctaccttgaatctatctgactcttgtttactgttcttgaatatgaaacagtgaattaacaattatagagcacaacagctcttacaatgagcaaatgttggggtggataggaaataaaatagtttgcagtaaaagtttactctttgacccacaactatttgaattttctctgaagattcataattattaaaactaaataaattttccagcttttggaaaaaatgtaatgctggagaatgtgttttattcttaaagaatgtggagaaattaagtacatttctgatatttgagatctctaaattaatcatttgagcagtcaaacatttagcagctacaactggatacaattcaagaaatcaagaattctaaaatgaactagctccctttctccccaccacccagaaaaaataaaaggcaaattttacacaactgaagattgaattcttcacaagaacataattttgcttttcccccacatctagttctgtgtaattgcaatcatttctcattttctaagaataaaccttactcatggaatagagatctgaagagcagtgtgatgcttcagaaacagcatgggactgtcaggagtctccactcccttgagttaataactgcttaagttacaagtcctttaatatctttgtgcctcggtttccttttaaaaggggggagttaaatgatctttaaggcctgactagttccaaagttacaagatttaaagtctttgataaatcaaagtctttttcaataagaatatattttaacttttaattaaaaatgtccaaacaaagccaggcgtggtggctcacgcctgtaatcccagccctttgggaagccaaggtgggcggatcacctcaggtcaggagtttgagaccagcctggccaacgtggtgaaatcccgtctctactaaaaaaaaaaaaaaaagaaaaattagctgggcatggtggtgggtgcctgtaatcccagctacttgggaggctgacacaggagaattgcttgaacctggcaggcggaggttgcagtgagccgagactgcaccactgcactccggcctgggtgacagagcgagactccatctcaaaaagtaaaaataaaaatgtccaaacaacatctatcatctttaacaaccatcaacaatttgatagactcgctaaaatattccaagtgtgatgacaaatccaagcctatttatgtgatttaaatccagaaaactataggacatgctaactgactgcaatgaaatggattctgggcaacaagtttaaaatgtccttttttcctctgccagagggtacttcctatacagtaaaggcccccaaaccaaaattttagaaaaacatctgtagcctacaaaagaaaaatatttctgacagagaaatccctttacatctctatcaacactgtagctttgtgggcccctaggctgtttaaacatactttccttcctttctgttctcatttcttatttattcttgtttctattcttatcttttattttcttttcttatttcttgactttgtttcctattgctttcgcccagttctgtttcgggaagtgagtattccttctacatacatcttcagccaatcagattgttcctttattttcggatggcaaccctaccaatgactgatgctcaggtttaattttagagtcctcaggtcttaaataatttcattaatgttgtttaaaggctcatttaccctgccagagagattcttaaagagattctgtgaagttcagtatcaactccatatatgattgtgtgtttataaatatgcttcatgttttactgtgagattatggtactacacatataatcacgattttcaaattctgctaatatttctttccaaatattaaaatgtaatgctaacatttcaaaagccatttaatacaggaaatctaagaaagaaggaaaaaactaaactacaaaactcatgtataaatttttactgttaaagatagttttagtttgagtaaaaactcctaatttgcttaccactgtcttataagatatacctctaatatatgacgttatcaagccatttcacctgtgtgtatataaatagataactggggaaaggtcagcaacttaattaataagggctctatttataattatgccatcaaagctaatcaccaagtaagagctaaatacactagttgaaattctaagtctcattaacgatggtgccagaaattttaattaaaatagaacatctcatttaaatgattagctttgataatttaagcatgaatagaggtctaatttattaatttgctgatcactgttacatgcattagatggtttattagatatcatacattaatgatctctttgagaagctatgtcagagaagacagcaatatttctacctcgttatacaacacaagtcataagctatcaccatctattcctaaagtgagaataggcaataatcaaccaagattataatcttcaagatacatctgtacaatactttcctctaaaaaagagaaattgggggagtcacgatgattagacaacagtatgttgaaattaaaattatcaactaatttaaaacaagagttgtttgaaagaaaaaatgaaaatagatggctcaaagtgtctctgttgaaaaaccaacacacagaacaagaaatagttcaaagcagacacatcactgaaacatgtatgtcatctctaagatgatgtaagtaaatgtcgatttactgaaagctgatcaaagtaagtgacttactagcattccatttttatcagaaagccattacaatatcacaacacaaaaatgagccatttcacaagccaactccgagacttttacaaagatgccttcaaaaaggattttctatttattccttatgagcacttttaatcaaactactccatagtgaagcacatcttaaatggcaaaagctttcctttgcaccagtatcaacattgctacataatcgttttgagaatttgtccctgaagataaaatgactgaaaagtataatggaaaaaaaaggtcccattaataacaaaaacaaaacaaaacacatcactctaagaatattggaaatactcaagatttaaatgaagatgctacagatttttgaagaggaacattcaaaaaataagagagagagagaaagaaagaagagagaggccaggcatggtggctcacacctgtaatcccagcactttgggaggctgaggcaggcggatcacgaggtcaggagattgagaccatcctggctaacatggtgaacccccgtctctactaaaaatattaaaaatattaaaaaattagctgggcgcagtggtgggtacctgtagtcccagctactcgggaggctgaggcaggagaatggcatgaacccgggaggcggagcttgcagtgagcccagatagcgccactgcactgcagcctgggtgacagagcgagactccgtctcagaaaaaaaaaaaaaaaaggaaaaatagaagaagagagaaaaagggagggaggaaagaaggaaataaattaaatgagaagtatttgtaaagataaaatttccctcaatttaagctacaagtttaatgtatttcaaataaaaagccaagaagggtgtgtagaggtgggacagaggaggaggaaagagttcataaagttattttaaatttttttttagtagtaaaaccacagaatgaccctcctcccccatccactccatgccccacatatagaaactggaagggaaaaagtaataagggagactttaaactactgggttagaatgccacaaaatctcaaaacttaaaacagtataattctagcacagaaacttatagatgaagaaaaacacaaagtccagaaatagatcacaatatgtaatgaagaaatacatcttactcagaggttagagtattaaattatcatgcaaagtgaaaaatcccacacagataaaaattacctttgaaaaatccttaatcatgccaaaattactaaaaactgaacttttggaagctcagaggtcaagaattaacttctgttgtttctctctgcatttcattttgcactacccccacccctcggagcaagtatgatacagtgctattgcaaagaatttggaaagtgacatctctttagtgagaatgtaataattccaaaaagacaggaagacaactggctaaacgtctagagaaaatgtaaacactaatcccaagcttacactggcatttaaaatcaaattggagcaatttatcaatctattggcaattggggatggtctactgcctggctcaggagaagatggcactttgccctttgttgtcctcctcatcccatcacacctgtaaggaccggaagtgggaaaggatgcaggcagtactgccagaccacaatgtccagccttagccaagcagccaagggccatggcttttgctgcgtttgaggtggggaaggaaaatccatggagttaagcctaattatctacatgagaatagtctaaaaattgaaagtagcaaaaaatgttacagaatgggaccaagatcccattcagtggtgatataggtgggcatagcaattgggggaagggcagagagaaattgtttcaagttttcccaacaaataatctccctccattaatggatcatacattcacatctataaatgctaggaaaggctaaatgttatagtaggtatctttgtctagttaaattataaataatttctctaacttctacattttctgtgctggccatgtatttcatttgtcacaagaaaatcaaaattactataaaaagaaaaaacaagtgaaacataatgtaaccaaccatttccatttaaatgaactgttacactaacatccagatatcatcccacaagattaatctactaagttttctgggaataaaaggatccatagtgggagggaaaagccttttctttgttgttaacgttaaagaaattattttaaaaggttggaaataaacagcaagcacatcaatcattcactttgtgagatgattcatgcaaaagcattttgaacagactaaagttaccctaatacactgaaaatgtgaaaatctgcaatgtgctaaaaaaatattatctttgtcaaataaatttttcagtgttgtcagtaaatcactcatttgtgaatctcatgcaacaaaataaaactgaccaaatgtttttgcaaaagtaaatttcactctaagaacccactgacaatgaaaggtacttattcacacacaaacaaagataacagaaatatcagacattaagagcaccaaggtacaaaaagcttaaattccaaaattaaggcccatttaaaaagatcaatgactaaagtagattattcaatatgaagtattatttagtaaagtacaaaacttcataaaacctataaaaactttggcacacagttccccctcatatcatgaactcatttggcaggttaaataaaaacatcataagtgatatcagcaaaaatggcagagtgagaaactccaaagtccatccctccataaaaacagaaaaaaattggcaaaagctgtcataatccattttttgggaacctagaaacctaattaaaagcttgtggcaaccagaaaaacaatcaagaattaagcaagaaaaagaaataaaaggcattcagattggaaaggaagaatgaaactatttttatttgtagatgacattatcttccatataaaaaagcctaagatatctacaaaaaaatctgttaatagagttcagcaagattgcagatacacaatcaatatatcatcatgtggttaaacactagcaatgaacaatcaaaaaatgaaattaagaaaacaattccatttatgatagcatgagaaagaataaaatgcttaggaataaatttaacaaaagaagtgcaagacttatacttggaaaattacaaaatactgttgaaagaaatgttaagcgtcctgaacaaatagaaagatgtccatgttcaggtactcgaagacttaatattgttaaggttgcaatactccccaaattaatctagagatttaaagcaattctttttttaaatgtcagctggctttttttctgaagaaattagtaagctgatcctaaacctcacatgagaaaattcaaggaacccagaatagccaaaacaatcttccaaaagaacaaaatataaggactcatacttccaattccaaaacttactacaatactacagtgtacaatacagtgtggtactggcagaaagacagacacacagataaatgaaatacaatggagaatccacaaataaacccagcatctacagtcaactgatttttgacaatgttgccaagactattcaatgggggaaaggagtcttttcaaaagcggtgctgagaaaactgtatggccacatgcaaaagaatgaatttgatacccacctcacacaatatacaaaaattaactcaaaatggaccaaagaactaagaaccaagtgtaagaggtaaaactataaaactataaaaaggggccgggtgcggtggctcaagcctgtaatcccagcactttgggaggccgaggcgagcagatcacgaggtcaggagattgagactatcctggctaacatggtgaaaccccgtatctactaaaaaaaatacaaaaaaaattagccgggtgtggtggtggacacctgtagttccagctattccggagggtgaggcagcagaatggcgtgaacccgggaggcggagcttgcagtgagccgagatggcgccactgcactccagcctgtgcaacagagcgagacgccatttcaaaaaaaaaaacaaacaactataaaaaggaaatgtaaaagtacatctttgccatcttggattaggccagggtttcttggatatgacaccaaaagcataagcagccaaagaaaaaaatagataaattgtagtttagcatcaaaggacactatcaagaaagtgaaaagacaacccacacagtgagagaaataattgcaaatcatatatgagattaagagtctgtaccagaatacattaaaaaaaacctcttataactaagtaacaaaaaaataaccatttttttaaatggctgaagcatatgaatagacatttctccaaaaaagatacaaatgaccaagaagcacatgcaaagatgtcaacatcatcagtaaatagggaaatgcaaatcaaaactacagtgagggctgggcgcggtggcttacgcctgtaatcccagcactttgggaggctgggggcggatcacctgaggtcaggagtttgagaccagcctggccaatatcgtgaaaccccgtctctactaaaaatacaacaacaacaacaacaaaattagctgggtgtggtggtgggcgcctgtagtcccagctactcaggagcctgaggcaagagaattgcttgaacctagaaggcagaggttgcagtgagccaagatcatgccactgcgctccagcctgggcgactgagtgcgactccgtgtcaaaaaacaaacaaacaacactacaatgagatcctactacacacccattaggatggttataattttttttacaaagcgagtatatagagaaattggaatcctcatacatagctgtgggaatataaatgtgcagagaacacagtttgcagttcctcaaaaagttaaacatagacttactacatcacccaagaactccactcctaagttacagtgtggatgcacttcaaaagccagatataaaaggccacataatgtatgactcaatttttatgaaatgtctccatagacacagaaagtagattagtggttactaatctgagagtggggaaattggggtgtaattgcttaacagttatggggtttcttttatgggtgatgaaatgttctggaattagacagtagtgatgactgtataacattgtgaatacactaaaatccaccaaattgtacaatttaaaatggctaaaatggtgacttttatgtgaattttattataaatagctaaaacatcacttaactgaaaattacattactgatcagttgtaaaactactgttcattataatctgaaagactgtcagatgtgtgccaaatttttgtaaagtatggttccaaaattctagatcctcacaatacatatatgtagataccaattcatctttattgtgcttctaacttactttaagagcctaaaatcacagtaagttgttttaatgacagctatacagaatgagccaatcaatgaatactgggacaatttgaacagactgcctctaaatccctacaaataagacatacagctttccctatgaatcttgacttttaattagcatctatagcaggcaacttgtaaaatgtgaatcaattatttctaatggcctttagatatcattctgaaactgccaaaatgaagctaatatcaaaaaagtatttttcatatatcaaaattagaaatctttatcctgatttaagatgtctctgtctgatatgactacaaccggctttacacatttttatctttaatcactgcaaatttaatgggatcagctagacatttttgtagcctacaccacatggtactgctttggaagttttataacctggaattactaagtttttcataggaaaaaaaagtccataaagatgctctttagaaatatctaagtattttactttatttatttatttttttttttgagacagagtcttgctctgtcgcccacgctggagtgcagtggcatatcttggctcactgcaagctcagcctcccgggttcacgccattctcctgcctcagcctcccgagtagctgggactacaggcgcccgccaccacgcccagctaattttttctatttttagtagagacggggtttcaccgtgttagccaggatggtctcgatctcctgacctcgtgatctgcccgcctcggcctccccaagtgctgggattacaagcgtgagccactgcacccggcagaaatatctaagtattttaagataaaattcagtttaacttaaaatgcttagtttagcacagtcaattttatgttaaaaatctgcaaattctgatatttgggaatcagagtccctgggtctaacaaagcaccaggctgagtggcaggagaaggagcacagcacttggagctggcactggctgaaaagccagcatctttggaaagttctcattaacaaatttataattaacacatgtaacttaaagcgaaaagaagaatcactaaaagccatttcctcagattaaaaaaagacaaagctccttgaatagagtcctcagatattcaatattttctttaaacagcaataaaagacttttaaggggcttcatgtttcaacaaaagtgtccactttacaaaacctgaaatacaataggagggtggcaattaaaataattcccaagaaaggattatctttaatacgctgttaaattcaataagatctgtgccttcctattatcaaatcaataaatactgatatttttcacaatcagctaataacaaaaggaaaataagaagacatttacctcttctaagctagggagcgaagaagaagatactgttcgagatgacaatgggtgaaatggctcttgaccaatagcatgttgatgattctgtatttgtacaaaagggttctgcggtggcctgtgaggcaatggaggtaggccatagggaaaacctggccccattaggtgattctgttgcaagttagcaaaagtccatgctccatcaggtgccaggtatttcaagggaggaggggcaaggtgttcagatggcaacgagaaaggtgagttgaatatctggggtgggaggcgctgtggaaatgctgggttgctggctacttcaatgtctctgctgttatcattaaagttagaaaagtggctactgtggtctgtactggatgggggagatgggactgctggtgggcttctactctgtacttgtctatattgcaaaagtcttgattgaggtggtggcatttcagctagttcccgtgtttcactttgatcacgatgagacagttctctgattaagtcttgaaacctacatgaaaacaataaaatatgaggagaaaacaaaaggctccatcacattaaggaaagcttagtcaactacacatgtattttcaacaaacaaaatcatagtactaataactagaactggcattaattcatctcagatgtaagcattaacactcaatagatgctgaggtgaagaaattaaatatgctcaattacctgatttctttctgttcccattgtattaaaaacatctgtccttgtctctatacagctttgacaactggaagttataaaaggtcaccatgatggtggaccttattcagaagggattaggaaacacttcagagcattcatgtgacactggccacaaaaacaagcttagagttaggaccaaatactcatatgtagctggaattataggaatgtagaattctgtgccaccataaaaataattaatgatataatttttagcttttaaccacgaatttactcctgtctttattcattctttgcaagtattactactaaataaaaaaagctgctcacagtgatggtatgtttctctcgcagaaaagaccacaaagtaagggaacaagttaatttccaacccatagtagatcatccatgcctaaatttgtagaagagttacttctaaatgagttttctgtattttagagtcaacaagagaactgtgtagcgtgtgcttggaaggccagcatccaatttctctgaggcaatattccagcttgaagctaaaaggactacagtcaaaaaagagaacagtgagggggtcgcattccaggggctattttcagtccgctggaataccttgagtatgtggtctccacttcatcttcggcactgctggtgagcttccagtctgccctcactggcggctgatgtaatcccaggggcggctgaggaagatgctggaggtgaggatggtgatggtgtgggtatggagcgctgccctgactgagaaaggcatgatgctcgctccactgctggaaccgtgcctgctgctgccttaatgtttccagagcgacactcccatgtatacgatctgcaaaaatatttgtgaaaaattttttatgaatttggggtttcaagttcattatttaaagttttttactaacatattttctccacaaagacaaaggacgtagctacaaatttggttttggtaagaagtaaatgttttctaaatttgccagaaatcagttatggtgatgatgatgacaactcttcctcacttacataatgatgatcctgacatccactggatactatcatacagcatttagaactagtttctgattatcacactaaatgggggggttttgctagcattatttgaagaaacaattcaatcttaacccaaaatgatattatacagtccaagtcatgttaagtaatctctgaattttcacatctggcagtaatagaacttacctaaagcctcccctataggtaatcccgaggggttctcatcaatgaagctattcagatgtgaaggaagaatggggccgggttgtgcaatggctctcagaggactgtggccttcttgcagcatgggagggggctgctgctccggaattacagcttctgcaggaggagactgtggccgatgagcaactgcactattaaaaaaagcattgttgggtcccgcctgatatgcaggagaaagctgaggaggtggctgctgaggctgctgattcaactgactttgctgctggactacctgatttggctgaggtggtatctgatttggttgttcaggcaaattattctgctgctgatttaacaaggtgtgctgctgtggaattggaaagggtggtcttggtagctggggaaggggatgaaagtggcgattagggattgcatactgtgcgtggggagcaggaaggggaagatttatgtgtcttgggttgagattatctttgcgaggaaatttggtactgggataaacaacactaggacgtgattcaggacttctgttctgtggatttgattccaaatcaacctagaaaaaaagaagaagccttttttaactgcagaagattcaaattcagttgctctccaccttttcccaaccctaacacatctaaaggatatgatacattgatatcttccagcaggagagctgagtgctcaattatttactttctcacaatcaaataaaggaaatttttttttaatttaaaaagatgacagaaaaaaaacagcatattaaatgtgagtcataagaaaagatactgccattttattagcatatctactttaattcctttcagggcattatttttaatttcacactttcttccttagaaagatggccatttatttcattctgatataaatcattaaaatgtgttttccttctgatttcagggtgggtttgggttttgttttgtttttttttgagacagagtctaactctgtctcccaggctgcagtgcagtggcaccatcttggctcactgcaatttctgcctcctggattcaagcaattctcctgcctcagtctcccaagtagctgggattacaggcatgcaccaccacgcccaactaatttttgtatttttagtagagatggagtttcaccatgttggccaggcctggtctcaaactcctgacctcaggtgatccgcctgcctcggcctcccaaagtgctaggattacaggtgtgagccatcacacccagcctgattttattgtttttatatatctaatatatttcctcaaaaatatctatgttaataaaaagatgtatctcaatttaaacaactttgaaatgaacaaacaagtactatatcacctttgtatataactagtttggttgtcaatttttccattacatattgacattctttctttaacatttattgtggccaaacaatacactgtgcctggtgttggaaattaaacaggcaataagaagactcagcctacacatcaagagcctagtgcaggcgtctatataccatgcccccactccaatgccatttccggctcaccaggttttgtaaataaggttttcttggaacacagtcacactcatttgtttacatgttgtctgtagctgcttgtgcactataatgatagagcagaacagctccaacagagaccatgtggtccccaaggctaagatttactatctggctttttacagaagaaggttgctgacccctggcctagagttcagtagaagataacaatatgtaaacatatcactagaggtactgtaagaggatgcaactgtagtgcctgagaaaattaaggaaggtttcacagaggtcatgacattcgagttgaatcttacaaaaagaggtggaatattccaaggagagaaggacatgctaggtaaaggtaacagtttatgcaaaggttgaagaaaggaaaagtatggcagattcggacagcatgggaagttttgtgtacgcagagctataacttcacttgtttatatattagttttcccttttcaatatcagaggaaactacaagagcccaatcacatgagaccctgaattattcaatactgagtaattgtttttaattccataaactgtgataactacaaaaagtttttaagctggggagtgttgtcatccttctgaaatgtaaatttgatcataagtgatgacaatgtgaaaaataaaatataagatggaaagaggcaatttttcttttccggctctgtcaaaacactccatgcattacttggagtgtaaataaatttggcacgtcaatctccttacaagtttcactgatgagctagtgactgaggattgcagagcacttgcctcaccctaggctcttaaattagccatagaactgaccactccccaaaaacagaacaagcagcttgttcctgagttgcagctggggtacacttggtgaccaacctgttgcaacaaatggttgtgatgcaaattgtgtgccaagtgcatcctcatctctaatcatctagctcaaatggattgccattaaatttggccaattttaggcccttaagattactgagtatgtataaattatctacaaaaagaagtgagaagcacgacaattctatctcagttttcccaagtatgcaatgcctgctcttcagatgtctcagaacctgattaaggttcttcataaacaaacattttcctccataaatctccatcttttcaatgactaaaattatattcagctgggatatacttttttccagaagatattgttgatatgcatagtttggtcacatgaaggaggtcataatcaggtgtcaaggttgtttatgaataagttgctatcttaattgtctctatcacttctgaccctgacattgaaaggaagctaggtctgcgtcacagaaatttagataaggactgtgctattctacaatactacaattggctccctaagcaaggtagagaatggtaagagctgaagaagcctgcatctgctactatcagaatcagattctcctctatcattttcctcttaatactgaggaggcactgagtcaaaagaaccaggactagttcttttatttttcctgggccccaagacaaagcatcagggtgggagagaaaacaaaacatgtcttcaggttgcctagttctctaacagagaagaatcctaacagaaattttaaaacaaggacatgagagacacttagatatcttggcttcagttgctctgagagcacctaagactcgtgcgattggtttcgtcccaagctgcctctgactatatgtgctgctggtgcaggtgcaccatcctgacatgccactcgttctctctctgcaccacttcccaaacacgtaccacttcagctttcactgcagcccccacttatctatcaggaggttcccttggctgcctcatttgtactgcagcccctccagtgggtactgaatccttccatatatagaagctgtgagtaagagatgcttatgtgatataagtaactgaataaagagaatagctgcttaaataaaactaggctgaggttggagatacagatttggaagtcggtatcatgaagtggatacttaaaattatggattgcactggtttatagtaagaaaccatagaatgcaagacaggtgggactaggacagaactctgagaaatcccagcttaaggactagagacagatgcttggggaggctgagcaggaactttttaaaaaagacggaggtcatgttagagagattgtgaaaagtaaaaatgtgtcaaagaaaacgaaagaaacaagatggtcaaagacagaagtagaaaacagtgcctaataccaagaaaagtcaagtaagactacatttgaagtatgttcgtaagagcacaatagttttagtgaaatgtagactatgtggattaaagagcaaataagaggtgaggaagaaaggagaaatgaggcagtagctataaaggagatgaaggttaaagaaattatctttttaaaaaaatatatcaagcaatttgcttactttaggctaaaagagatctaaatatgctataggctgacagggaagaacgaacagctggaaagaatccaaagataaatgaggagaagggacaaggtctatgtggtagttgaagaggagagattaattttttttttttagacagagtctcgctctgtcgccctggttggagtgcagtggcgtgatcttggctcactgcaagctccgcctcctgggttcacgccattctcctgcctcagcctcccgagtagctgggactacaggcgcccgccaccacgcccggctaatttttttgtatttttagtagagacggggtttcaccgtgttagcctggatagtctcaatctcctgatctcatgatccacccgccttggcctctcaaagtgctgggattacaggcgtgagcaaccgccaagtagagattaatcttaacgggaactcttcctctgagactggtgatcaggaagtaagggtgctcagggctatggtaaaagtgctaaatttaaggttacaaattaacaagagcaaatcctgatgaggtcagtctgaggcaagccatccaataggataatagaatgtggaaggtaatcaggcttgagaagagtcactgagacaactgggcaaaggaagtgagatacgtgtgaaagaaatgcaggggagccctgatggttccattcaaattagaaaacaagaacttccagtggcactaattcaaccagtgacttgattttctctaagtagtttataagcacagaagcagagaaaatagatgaatggacagataaagaattaagggcttagtgggtatgatgagagaataaggtgagggacctgagtaagtcttcccctctctgaggaagaagttctccttcttcacgataatgacacacttgtaatgacacacctgtagctctgtcttcatttactaccttatcatagaaaatctctaaattcaattttatcactgaataacagaatttgagaaaagtatactgatacatgaaatagcacagccaaagaaaagatgaagaaagagaaggcaatatggctcactatatccctgtgaaaaaataaacataaaggataagtgtacaaagggaggtatttttctttaaaacatcaagattccaagatgaccaatcagactaaatccactaggacaacacagtaactaagcagcatacctgttttggttctgttggctttttctctggtgttcgaatcttattaatttcaggtccggaattatttgtatcacttttacctaagaaaatatttaaaaatccttataagttttctccagtggatatgacacttccaatgcttatccaatattagagaaagaggcagaatactttaaacacttttcacccattatgatcagtgtatgactacttgggttttgttcttaaattttcagagttacagtttctctgcaagaaagaaaacttacaaatgaagcaaacttcattgacaaggcaaagcctaataagggaaaaaccttaaagcatcaaataatcccaaaggaaactacccaatctccaggaattacagcctcatttgcttaaactagatgtgttaaaggccttcgccttcttgcctatttataaaggctcaatgctttggtcacttataaatgcaattaagcaaaaatctaaataacgcctcaatctaatttagtaaaggaatctaaacataataaagatattcagaaagtaatgtagttatactgcttaaaagtaatagatatcaaaccgtgtataagtgggtgataaatagtagagcaggcaaaattaaggttttaaaaaagcacagttataatagacaattcatacatgggaaaggcttttaatctacaaaagaattaaccactggatagtttaagttccttgaaggaatccttgatttaggttcttgttccaaaacattctttttggaattccactggaactttgtaaaatgaattatcatgccagaattaccttaccattaagcttcaagaaatgaaaactatagtatcggagatgaagaaagcactgaatggaattaccagcagaatagacattacagaagaaaaatctggcaaatttgaaggcacagaaatagaaactacccaaaatgaaacatgaagagaaaaaagaatgttaaaaaaattagcacccataaactgtgcaaaaactttaagcatcctaatatatgggtaattagaatctctgaagaacagtggtaggggcaacacagaaaaaaatatctgaaaagatataaagtttaaaaatttacatacttgataaaaattataaactcagagatctgagcaactcaacaaacctcaaacacaagaaacaggaagaaaactacatcaaggcatatcataatcaaactgataaaaccagtataaaaagaaaatctataatgcagccagggagaaaaagacttgttacatacagaaaaacacagataaggatggcatcagatttctcactggaaaaaacgcaagtgagaaaatggtagaacaacaccattaaagtatcaaatgataaaaactgccaaccaagaattctccaccctacaaaaatatcttttaaaaatgaaagtgaaataaagacattttcaggcacacaaaagctgaaagaactcatcaccaggagacctgcaatacaacaaatatttttaaaaagtctttcaggcaaaagaaaaattgtatcagctggaatcgtcaatatacagaaagaaaaattactagaaatggtaacacatgggtaaatacttaagactatttttcttataatttagaactcttttacttggctgtttaaacaaaaataacaattatgttttggggatttgtaacttatgtaaaagtaaaatacatgataacaatagcatacaggctaggagagaaaaaatagcatactttaagcttcctttactgtaaatgaagtggtaaaatataaattggaaagtagtctgtgataggttaaagatttatactataaaccctaaagcaactagcaaaataataaaacaaagagttgtcactgataagccaatggagacaaaaaggagtcattaaaaaaaaaaatactctaccaatccagaagagggcagaataaaaggagaaggcggaaaaatcaattggacaaattgaaaacaaatagcaagatgatagaatcaaacttaactgtatcaacaatcacattaaatgcaaatggtctaaacaccccaattaaaaggcagagactgtcacattagattgaaaaatatcaagagccacctatatgttatctaaaataaacaaactttaaatataaagacacaaatagattaaaagtaaaaggtaaaaatacacacacacacacacacacacacacaccatgctatcacttgataagagaaagctgaagaggctacactgatatcacacaaagtagatctcaaaccagagaatattttcagggacaaagaaggtcattccataacgataaacgagttaattaatcaagagtatgcaatcctaaacatttatctcctaataatagaacttcaaaattcatcaagaactcacagaacttagaaacctgaacattgaaaattagacaaataccaattatattgggagatttcaatacccctcctcagtaattgatagaaagagtagaatcagcaaggatacaatagacctgaacaactctaccaaccaacttgacctaattaacatttgtttttcttttttcaaacagagtttcgctcttgttgcccaggctggagtgcaatggcatgaatctcggctcactgcaatctccacctcccaggttcaagcaattcttctgcctcagcctcccgagtagctgggattacaggcgtgcaccaccacacccggctaatcttgtatttttaatagagataggtttcaccatgttagccaggctggtctcaaactcctgacctcaggtgatccgctcacctcagcctcccaaagggctgggattacaggcatgagccaccatgcccggcccctgattaacatttacagagcaatctattcttctcaagtacacacagaacatttaccaaaataaaccacattctgggctgtgaaacaaatctcattcaaaagcattcaagtcatacaaaatatgttctcttaacacaatggaattaaagtacaaatcagtaacagaaaaatttctagaaaatcaccaataatcagcaactaaagcacctttctaaataatccatgggtctaatttcaagagaaattaggaagcatactgaactaaatgaaaataaaaatacaacatactggtctttttggaatgtattactgaagagaaaaattataaattaaatacttatattcatttaagctttcactttaacaaaatatgtgcaaagactgtatatactgaaaactttttttttttttttgagacagagtcttgctctgtcacccaggctggagtgcagtggtgtgatctcggctcactgcaacctctgcctcccaggttcaagcgattctcctgcctcagcctctcaagtacctgggattacaggcatgtgccaccatgcccggatcatttttatacttttagtagagacagggtttttccatgttggccacgcctggtctcgaactcttgacctcaggtaatctgcccaccttggcctcccaaagtgctggaattacaggcatgagccaccgtgctcggcctgaaaactttttttaatgctgaaaaaaaaataaagacctaatagaaaaaaatggagagatatatactccgttcaaagatcaaaagaatcagtattgttaagatgttaattctccccaaagtgacctaaagattaaacacaatgtcaatccaaatcccggaaggctttttagtaggaattgacaagctgattctaaaatacatagaaatgcaaaagacctggaatagacacttttgaaaaagaacaacgttggaggacttacactacctgacttaaagacttttacaaagctataataatcaagacagcatatttggtgtaaacataaacatatgcattaataaaaagtatccacatataggatcaactgattttcaacaaaggtgccaaggcagttcaatgaaggaaggacagagttttcaacaaatagtgctggaatcactgaacatacatatacaaaactaaaacaaaataacaacaaaatctcagtccttacccttacactatatataaaatttaactcaaaatggacctaattaatgtaagagctaaaaactataaaacttctagaagaaaacataaaagaagatcttgggttagatatattttttttaagacacaacacccaaaacatgatccatagaagaaaaaatggataaaatggacttcaacaaaaataaaagctgctgctctttgaaagatactgttaagaaaatgaaagctagacacagtggcgtgtgcctgtagtcccagatactcaggaggctgaggtgagaggattgcttgagcccaggagttcaaggtcagactgcccaacacagcaagactctgtctttaaaaggcaaaaaaaaaaaaaaaaaaaaaaaggcaagccatatcctgggagaaaatattttctaaatatatatctcattaaagattagtatccagaatgtataaagaactcttataactgaagacaatcaacccaataaaaaagtgggcaatagatataaatagaggtttcatcaaacaagatacacacatggcaaataagcacaataaaaagatactcaacatcactcattattagggacatgcaaacatgtaaattaataccacaatgagatatgattagacatccactaacaagagtaaaatttaaaaaaagactgagcataccaagtgcaaatggtaatctggaacaactggaaatctcatacattactagtagaaatgaaaaatggttcagccacttttgaaaaataatatggcagtttcttataaagttaaatatatatttataatatgcccagcaatctcactcccaggtatttacccaagggaaataaaaacatgttcacatgtatgttcacagcagctctattcataagggccaaaaattagatacaactaataggtgtatcaaatgatggatgaataaacatattgcggtacatccatacaactgaatactaacggtaaaaaggaacaaacaactgacacatataatctggtggaacagcaaaagcattaagctaagtgaacaaagctggacacaaataattatagaattccatttttatgacatactagagagtatgggacaaaagtcagatcagtggttgctcagggctgggagctggaggatgggattgcaaagggtggaaagaaactttttgtaaatatgtaaatatcttgtatcttgattttggtggaagttaacaactctggatattgttaaaactcatcaatgtacgttttaaaagggtgaattttactgtatataactcatacctcaataaacttgaataaaaaatacagtaatttttccttgtaattctagcagacttgtagtaaaaataacctttatatcaacaatcccacaagattaatgcttagtacaccacaaaaatatttcgagttaacaaaaatgtttaacaggagaggaccttccatctcaattttaaatgactaccattttaaagtactctaaatattcaaatttaatatttttttcagaaactcagtgacaccaatcataagtggtaggatttaacctaaaggaccctctgaggttacatctcaattttgtgtctgtgtacataatttgtatcttctggagagaggatccatagtttatatgttagattctctcccttttcttttttttttttttttttttttttttttgagatggagtctcactctatcgcccaggctggagtacagtggcgtgatctcagctcactgcaaactccgcctcccaggttcatgccattctcctgcctcagcctcccaagtagctgggactacaggcacccgccaccatgcccggctaatttttttgtatttttagtagagatgggatttcaccgtgttagccaggatggtctcgatctcctgacctcatgatctgcccgcctcggcctcccaaagtgctggtagattctctctcaaagaggtctataatccatgaaaaagttaacaatcatactgttaaaggaactttctatgtggctaaaactttacctgtcatcagtttatgaacaggagaacagcgaagtacaacttaccatttcgattttgctcatgttgatccttctcctgatgctgattttgtggctggcctatggtgacaggtgggtgatgtccaaggccataaggaataggagatcctcgtccatgtgtctgtaataggttcatgttataggccattgctgcctgatgtgtaataattcgaggatcaactgcaaacctaccctggtatcctgtccatggtacctaggttattaaaaaataaaatacatgcattaagtatattttggaaggcaaactgctagagtgctgctgattagggaaaagcaaacatacaaagacatacaaacacacacacacacagatgttaattttctcaaaataaataactacaaagttgatgctaatactaacaattgtgtcttaactggctaaaaaacagctccctgcacctttagtatgtaatggaaaatagatcatttttcagattaggaagaaactgagggcttaaaattggtaattattccttgaggcattaaatcattttatagtatttacttgtttcccctccatatgaatgtatacatgtcagattaccataaaaataatcttttaaagtcataattgcatagaaacatagtttaatagacagggggaaaagttaaggaagaacttagcctaaggagtctcaactcaaaaaactggtattccaacttaatatgagtaaccacatcatttaatgttcatttattataggtaaaattcaaataggtcatctgtgcttttaattcaactccaccttaaaatacaaaaacagaaaacttgtttaagtgtgtctagatatataatctctgcatattaacacaaaaggaataaatacaatgacatctgagctactgctcctattattttattataactgttaaatgcaaactctcagaaatcttacaaaatagaagtctctttgacctagtaaagtgaaataaaaatcctaagggacttactatttaaagcagatgatgtatagtgttgccaagctgtctggaagaaataactgctaaaatccaaagtctgaagtctatggggagtgggcatgaattacgtatttctcatttacagtcattctccttggctgtcatgattgtgaactatcctgaccaacgtggctgagaaatgtttgcagctaagcattttcccattctggagtgtgggcaaggttgccaaaaacctttggcaatgatcatctcagcctgaaattacagtgcttgccttaaatgaaagaaattgtttccaaggctaaaactcctgaattgaaaatactcgtgtcagcaaattaacaaaatattcaaaaattctaaagaaagagaaaatgggtttatatacaagacggacggcctctaaaaatctatagtcttacaaaggatagagtaatgtttttaagtagtagttaagatttcacaagatgtggaatttctcaaatcaatttagatccaagtgaactagactaatccaagcctgtgtcctgtatttcttgggaacagtttttgacttatacaaaaataaaaagataaaatgaaaacatcactttacaaaatgagaccaattcattagctccgttaacttttagctcaattttcctcaataaaatattttaaaagattacaaattaaatatttagatttacaaattaaattttaaagattacaaattacaaattaagattacaattaaatattttaaaagattacaaaggtggccaggcacagtggctcatgcctgtaatcccagtgctttgggaggccaagtcgggtggatcacctgaggtcaggagtttgagaccagcctgaccaacatggggaaaccctgtctctaccaatacaaaaaattagccgggcatggccaggtgcagtggctcacacctgtaatcccagcactttgggaggccaagacaggcggatcacaaggtcaggagatcgagaccatcctggctaacatggtgaaaccccgcgtctactaaaaatacaaaaaaattagccaggcgtggtggcaggcacctgcagtcccagctactagggaggctgagtcaagagaatggcgtgaacctgggaggcggagcttgcagtgagccaagatcacgccacagcactccagccggggcaacagagtgagaccccgtctcaaaaaaaaaaaaattagccggacgtagtggtgcatgcctgtaatcccagctactcgggaggctgaggcaggagaatcgcttgaacccaggaggcaaaggtcacagtgagtcaagattacaccactgcactccagcctaggcaacaagagcaaaactctatctcaaaaaaaaaacaaaacaaaatagtacaaaggtttctaaattgaattataatttcttcacagtcactagtaacctaataacaaattgtaagcaacaattcgtaatttcaaggttagaggtaacatttgctttaaaagaagattatcagcactgaaaattttttttaaaaaagaagttggtagaatgctatttgggattagaaccattttagtgaaacctattttacttgattcaatagaaagtatttcgaatgtccacttacaggtaaaggcaccgacataactacattccctccatagacagcaggtacataaagaatacttgtcccagtgtgaggatctattctttgaacagggcttggagattttcccaaatttgggtgaggtccaagagggggtggaggagtatatgctctaataggattgccaataagtacagaaggattgggctgaactgaaaaataaacagaaaaaggatgcactcaacagctgtacatagtcatccagaaaaaataatttaaatcattcaacagcaaaatatatttcccaggtttgcctaagatatcttatcatcaaagaattatcagtgtggaaaagtaaagcatattacaaaaaaaaaaaatttttataatgctccctaaaattaacttgaattatacaaagcattccttttataaactagcataattttaaatattttctgaggaactcaggatgtgtctttcaagagagaaagctatgcacacactcctagtaaacagtcttctatctaaaaaattatacaactcttcagaataaagttttgacttacaactgtaacagaaccacatacaatatgaaagttaaggaattattttaaaagcacgactatgcaatatttaaaataatttaagtacattttttatcttgaaatatttatgatctgatatttgtaggacataaatattttctgaaaatttatgttgcataaaaggcttaaatgtttttcctcaaaacctctggatatgtacatgaatacctacaaaattgccccttttcagaaataacatatcaatgcactgataaaaccctaagtgttgaataaaaaaattgagaggttccaaagtgactgtgtgtgtgtgtgtgtgtgtgtgtgtgtgtcagagagaaagagagagagaaaccatctccccaccctcctctttcttgtggtgaaatttggggaaaatctcttacatcataaaagcaagttttcatagggtaatttttccacttaccaattccatcattctggaagtgatcattctgggtatgatgaagacttttcccctttaaagaaaaacacaaatgtataataatttaagcatgtttagtattagaaaacaataaccattttcctaatcatatgtaaattaatgtacacatcaataattaaaatctaaaaactgtgagtctataattaataaccattagactgctttgagccaattttctttttaaacattatgtcacagccatctcaaataatattgctgggcctcaagttttctcagtttcaaattaagggtatctaaaattccttttttatgaatatttttcattaaaatgaaatacgcaatcaacatgatttaaattttattcctttgcagaaatagaattgcagtttctctatacattttctaacaaatcacgaaacacagaggttgtttttcaaagtaaaaatgttaatcttcaagatgagaacctttaacggaataaaaagaatgcaaatatggcttaggatttatgacgttttgagtataattcatgctgtgttaaagtataaaatttactttaaaaaaacaaaaacaggaaaaggggaactgtcattatttgcttgtgagataatctagctaactgctagacagcaatatggcaatacatatcaacagcatcaaaaatgtacatacgttaacccagtaagtgcacttccagaaatttatccaaatgaagtaatcatgcatttgggcacagagagcatggtttatgtgtgtaataaatgttaacaatctacatgcccatcagtgcaggatttattaaataagcaatagcaaattcacataatggtatatttagtctaccattaaaaatgatgacatttgggcagaaacagtatttgaagagacaatggttctgaatttctggattaaaaaaaaaattctctcttcccatgggctaaaagtaacacgtatcaagccaattgaggaaaagtagcacattgcgcaacttacctttagacacacacaaatttgtaaatttgtaaattacatctgaaaactaaagaggggattatgtctacagcaggaaaaaaaaatcattcttgacaaaagcaaaaatacaatgatgtttgatttacctacctatctaactgttggaaagagcaaatattcagatcagcagtaaacacagaaggtttaaggtcaattggttatgagtgaggaagggcagctgaagtcagaaagtcataaaaaagcctcatgaagtcagaaaaagaccccctaaaaaatcatagttggtccattaacctcaagagaaagcatgttcacagtgattggcaccaactatatatatatatatatatatatatatatatatatatatatatatatatatatatatatacttgtgaggaatagagacgtgataagaaaagcatacagaaaaaaggagaaaaaggcaaacatcaagatggcaaaagtataagatgagaagcaggagcaattagaagagacaagatcagccagtagcacacacactgacagaagaaaggagagccagtgacacaaacagcagataagacagttccaaaacggtgacaaaccatttagatttcttatcctccagacctatcactaatttgctaatgactcaacaaccagggacaactgcttagcatgtggaggaaacacagcaatttaatcagagtgtggcaggcagaatagcccctgcaaagaggcccacatcctaatccctggatcctgtgaatatgttatgtggcaaaagggactctgtgaatattaattaaagttataaatttaaaacagggagattatcctggattatgtgggtgagcccaatctaatcccatgagccctaaaagcagagaaatttctctggctggaataagggagacgcagcggaagaggaagtaagagagattcccagggaaaggaggattcaatgcaccactgctggctatgagatgtaggggacacagttgagaactggtaaaaagcctctagaagttaagaatgattcccagctgacagtcaccaaggaaacaagaacatcagtcctataaccacagggaactggattctaccaacaacctgcatgatcttggaagcagattctttccagagcttccaggtaagggcccagaaagccaatatcttgatgctggccttgagaagcccagagcaaagaaaccaaccaagccaattcagacatctgactcatataattgccaggtaatccatttgtgttgtcactatgtttgtgcttattcattacagtagcaataggaaactaataaatagtaaccataatctagggtaatcctacattgtaaagctggaagaacgctagacaatatatatcagcactatgggtactgtgtagtatactaaattaaaaaagcaaattcgggcctatggagtaaaaagatagtggcatgtctacaagtataactcagcattccacatggttcaatacaggatacaatcctccagtcactgtattttgtattttgacttagcaagaaaccatagaacagtaaatttacttagtttatataaaatatacagtgtttggtagcttattaacaaaataataatgtagcaggctggacacagtggctcaagcctgtaatcccagcactttgggaggtcaaggcaggcggatcacttgaggtcaggagtttgagaccagcctggccaacgtgatgaaaccctgtcctgctaaaacacacacacacacacacacaaaactactgggcatggtggcgcttggctatagtcccagctagttgggaggctgaggcagaagaattgcctaaacccgggaggcggaggctgcagtaaaagtcagattgcaccactgcactccagcccgggcaacagagcaagactgtctcaaaaaataataatagtaataataatgtagcactaagctagagctagctatgtatgaaagtcatgtcccctgttctcttataccgggagtcttttgtaaaagctctcttaagctttactcattcatttaaaaaatacttctaagtacctattatgagccagattttgctctaggcacagaggtgagagcaacaaataatacaggcaaaaatctctgccttaagtgagcttatcttccagtttttgacatgtttccccaatctcccactacctccacccacccaataaacttctgaacaagatctccttggtagaaattgccttcaatttacttcctcttcctctcacttcctctcacttctccaacatggccacaggcggactcgggggctaatttgctactgtgctcctttagcacctacaataacatctggcacatagaagtaacttaactgataaataaacagctaatacattaatagtataagcttgagaaatctacaagattcatttatgtacaatgtgtgataccctaaaaatgccaaatcacaagtattattgcacattaggtccatttttattaaactaagaatatacaacagtatattaacacagagaatagttctcagctgaatacctatttagctaaaagattttcaaaatattaaactcttaattactgcttacacattaagatttacattttttggcctggtgcggtggctcatgcctttaatcccagcactttgggaagccaaggcgtgcagatcacctgagccccggagtttgagaccagcctgggcaacatgctaaaccttgtctctacgaaaaatacaaaagttagccaggcgtggtggatgcgcctatagtcccagctactccagaggctgaggcaggaggattgcttgagcctaggaggcggaggttgcagtgagcccagaatgtgccactgcactccagcctgggtgacagagatcccctctcaaaaaaaaaaaaaagatttacattttttaaaggaagtgcaaaactgacatactcttttaattcttattggtaactttaatatgctgatgattataaatatcaaagaaaaaaaacagaacaaatactaaacatgccagtctcagaaccttcttttctagatggtaagtgcaagcatctttttcaggcactctagcaaataagccggctgtctctgtccaaaataactatagttcaaaagtggaaatagccttgactcccctgctccactccctctgactggaatgcttctatacaaaaaatatgtgtcaaaatcaattaaagtcatcttcaagaagtcagccaaatttttttactctgtcaaataccacctcaaataaattggtcatcagtaaaggttcagaattatttgctttatacaaatatcgttattataacattattccttataaagaatataaggacatgttttagtaagtgtgataatcttttaaacttctttgttttattcacatctcactaaaacaactctatcagtagagaggattagaaggttattttatataaatgataccagaagttatcagtattaaaaattgtttgagaatgatcataacattaagcatgactaaacaccatactgtattttcacttacatgtccacactaaacaagctccttgcagaaaccgcttgccgccaaatgtaaccttcaattccaacacttaaagtaacttgcatcccaataaacctttggcacttctgcgaagttttctccctttaacctcttcaatttcattaacagaggctttaccttgggtggtgattgctgctgtttgttggtacttcctgaatgctgcagtcttagagcccgggggataaattcaggtgccagcggattcaacacatatgtcttctttagttctaaagcctctaactgggctttgatctgttcaaaagtgattccatgtaggctactgttttcatgacacagggcaataaaccgttcccaaaatttcctacagaaaagatttacaagatcagattacaattcaatggatgagatcacagaaatgaatataaataactaaagataatctcaaattccacccccaacctcaaatccttaaacccaatagtcatctatgattgagataaaatctttctaccagatcacaagactccagaagtttgattttgaaactacagtcataccttgtattatagtacatataaaacaggctctccattaattctggctcaacaatgcaagtaatatggtcagtactcacctatccacactaattcaaaatgatcttttttattacccatataataagttttcaaaactgatggcaactcatttcacacaaaatttgtacttctaggcatacttactacatacatatatatactatgtatataaaattcaatataatgaatataaatcacataattctaatttatatacatacgcatatatacatatacacgcatgtatatgtgtatatatgcacatacatacacatatatacacatacacatatatacacacacatagataccacatgtatgtgtaatctatgtgtgtgtgtatatatttgaattataaggccaaagtagcctagtgttagatgactaagaaaagccaactcaagacataaatttgagtcacaaagtacataatcctcatgaggattcttaagaaataaccagctactccgtatttttctcttaattaacaggtgcttgttacaagcacaacttataccattaactaagttataagtgttaaatgaattatgaaaaatatgggaagttggaatgctaattttaatgttgattattcatttcttaatcaaattcataagtactaaaggagaacagtacattcaaaacttgttgcatttacataccgttgtttctaggtttgaaaattgatttctaaatattaaaattattaaatacatattacaaaagacaacatataaagtttttaaattttaaatgactattataaatatgcatacctatgtttaatatgagaggttcaaataatgttttattatgctataaaagatatgtgatatggtttcttcccaagttggtatccttgtgtccaggtggacagcaggtaatcaagatggcttcaagaagcataaatgaaaaggtttatattataaaagttagtatatgaatgggaattgggttattaatatattcataaaactttgcagagtttaattccaaaccgtgcttctcttacatatgccttatatccatctttcctagttttttgaagatgagtttaagaaatcaattgagatactggagattcagaaggtagcggggtgggagaggggtaaggaatgaaaaactatctgttgggtacaatgtacactactcaggtgaggggtacactaaaagtccagacttgattactatacaacttatccatgtaaacaaaaaccacttgtacccataaagctgtcgaaaaaagaattttaataaaaaaaattaaaaattttaaatggaatgaataaataaaaaataagcaaatgggttcagaaaaaattttagacctatatgtaaacaacagaaaaagtaaaaatgctacaaaatattaaatatgtacttctgactataagactaaggctaataagacagtcatgcagttgctggaaatgtgtgttgccaggaaatacatgctgaaaagctgtcctttatttttatttttaagaacaccaatgaaggaattgtgctttttttctcatcataacatgagaaaatatagggaaggactatcttatatagcactcaggatctaaaatccatccactttcccacccttttaataagaatagccacaatattcaactgcatatttatcaatacaattctattacatactacattcaaaagaaaggtctttttagtctaattgataaagtatcagtttcacagagtggcatttcaggtttgcgttggacttcaagacaaagcaaaacgctaaggaaagaatggattgacttttactctgtctagttcagttatttgttttttcagagacagggttgtgctgtcactcagagtgaagggcaggagggcagtggcatgatcacagctcattgtaaccttgaactcctgggctcaagcctctcgcctcagcctccagagtagctgggactgtagttgtgtgccaccacacctggctaaatttttaaatttttttgtagagatggggtctcgctatgatgccagggctggtttcaaactcctggcctcaagtaatcctcccaccttgacctctcaaagtgctaggattatgggcatgagctactgtacgcagcctctagctcaatttttaatatcaatttcttattacatttttcatttccagctttcacagccaaaatgctagaagttgctctatttttaagctactttttaaaactccataccctgttcctatatcaccctcactgaccttgaccgcaatgaacagaatttgaagtaacattaagtcaaacaacctcacacttcacaaaaagctggagcttggtgacagtctttgcctaccagaagattctagagatttcaaagaaatagccttcgagttaacgtgtaccaatttaaaagtaacattaactacttactataagttaatcaagttaaactggctccaaaagtgacctgaaatttgcatgttaaatctgaccttttttttttttgacaccattgatatagcaaaatggtaaagcacatggattctagaactagcctgaaatcttgactctaccattcagtagctgtgtgacttcgtgcagattacttagcctctctttatatctcagtttcctcatgtgcaaagtggggcgccagcactactattattattattccttactattgaaatgacatttgtgtctcacttctaaactttcagggaaatgcttctttccttcaaaaattcttagttttaaagctaaaatttttccttttttctctttacactggcccttgaactccccaataccttaccaaactactatgcatacaattatgaagcatttctgaatacagataattgacagatcacaatagaatgaggacaagaattcaccactctggttaaagatttcatcaattctcagccccctccctaaaacgttaacataatattatgttacccatttttttagtactattggtttaaaaacccaagtgtgtattacactgtaatataattttaggcatttcaaaggatgtaaccttatttttaatcactgcctgaacacaaagtttgattttctttctctgttaaccttacttctaggatcactgataaaacactaaaaaatcacttggtgtccttaggtcactgtgtgtgtgtgtgtgtgtgtgtgtgtgtacacaaatatacatatatctctacacatacatgaaatatgtttatattttacagagtaaataaaatgtgctaaatgaagaaattcagttcaagggaagaccttctccaaacgccttggtttgaaaaaaggttatcactctccttttagcctcctgccattccgtgcagatttatctgagcatatccatcatttctgggaaaggcagcataaccagagagaagaatgtgggttttgaagtcaatctgacacctgtttgagtgaaccacataatagctatgtgaccctgggcaatttaatctctctgaatcaggctgcccatttaaaatgcaaataaaatacccacattatagggttgttaggaggagtgaatgaggcaatgtgtgcaaagcacataaaccagcacctggctcaaagaaagctgtcaataaacagcagccactattaatacttcttagcttggtgagagagggggaggatcttcactatatccatttttgattaacagaaaaaaatctgtttaaaaatacaacaaaaaagaatatgtaactgattgacttctgaactggtataatatacacagtaagtattccttaaaaacttgattgatatttgggaatatattagtttttttgaaaatattaaatgaaaaaagcaggaaaacagtcctaatgaactcaaactacaaagaactcactcttccatttttacaggacccaagaatcatattatattctctgagcttacttgtactgtgagagtaaattaatatctaattaaattagtgagattaaagcttaaatatccatatgccccaactatcaattcttgggctacagccatgattaaactgtacaaataaagcagacaatcaacattgccatgtaactatgaaatgtatgtttttttttcactcaacataatatatttacttccctgaaaatattctgcttagcttatcaattaatgtatataccttgacacttcccagctgagtagtaagaaacaggcaactgcagactcagctttgaagttaaaaattagccctggataattctgagaacatggcctcaggaagaattattcacccatttgctctaagaaagtaatgatttctgtcaagacaatggatgaaaaatgctgatctcatgcaattcacagtataatatgattctttaagaaaggggtaatggtttctttaaaaatattcaggttggtaaatatatttggagttatttataaggagagcccaaaactaatgtggcttgacactattcttttttttattttctttgagacagggtcttgctctgtcacccaggctggagtacagtggcgtgatcactagagcctcaacctcctgggctcaaacgatcctcccacctcagcctcctgagtagctgggaccacaggcacatgccaccacacgcagctaaagtttgtattttttgtagagacaaggttttgccatgttgcccagggtgatctcaaactcctgagctcaagcaatccgcccaccagggcctctcagagtgctgggattacaggtgtgagccactgcgcctggccggaacactattcttaaatccatttactcccctaatagtttctagttgttttcaacatgtgctttaatatattacattctaatcaaattgtatgtgctgtctcacttatcaaataataaatacaagcaaaagtggtaaaataccacaagcaacattctaaacgaaatatacttacaatgactagtaaagtaatataaagtaaaattcttaggatgaaagcaaaattagtagacttcttgatatacctggttcttctattcatttgtaactcagaattaaggtattctcgactaggcgcggtggctcacgcctgtaatcctagcaatttgggaagctgaggcaggcagattacctgaggtccggagtttgagaccagcctgaccaacatggagaaatcccatctcttcctaaaacacaaaacattagctgggcgtggtggcgcatgcctgtaatcccagctactcgggaggctgaggtaggagaatcacttgaacccaagaggcagaggttgcggtgagccgagactgcaccattgcattccagcctgggcaacaagagtgaaactctgtctcaaaaaaaaaaaaagatactctcccctctccaatttgtcattagtgactacaaatgcatggcaatatatttttaaagtatgaaattaaagatgttacaacagaattgtttacagataaataagttacagacccttcaagctttgttttttaaaaaagaaatttttttttcataaattaaaactctacttgattcctttgatgatagctttcccctataaaggatattaactttttgaggggtcttaaattctaatatatgaaacttattcttaaaggtcccaaatagtctcccttcccagaatttttcttcctgctagaacacaaaaatagataataaagtgctgtcattatctatattgtaagaaaaaaaaacctgatttaaagagtgccatgtcctaatagttttgtctactttaattctaacatatcaaaaagaaataattacccaaggcagattcaggactacctacatctctttttactattctgaacttcctatgacaggtactagcacacttataaaattttaagtaatccctagtgtatttctttctttttcacaaaagaatattataaataactgttcgactgctttttttttttttaatgctagcacagttcttcaacactcaaaaggccaaatcttctattactggctttgtacagttaaaattccaattaactggtataagtcacaagtgtataaagaaagattttggtgtgtaggttgatattttaaccatatttagtagaaactgttccttaaaactaaagtctaatgaatactaataatgctaccgaaagacaagtaatgaccacgtctaaccccctaatgttaagatcttctggattaaccagatacaaagaattatctacattgagaagccttgagagagcaagactacagaaggaaattcatcaaaaattagaacaattaagtgaaaaagtgaggcactaagggatataaaagttaatatccatcaaagacaaacacatgcatgaaaccagctcaggacccctgctctagttgttgcttcttcctggagcacttttaacccaaatagcttctccctcacttccaagtcagcttctcagtgaggtctgctctcaccacgctatttacaatcacaagctagtctgcaccgtcctcatcattcctaattcctcttaatattttcctttccattcaacttaccatgtaaaatactatataatattcctatttagtttacggtaatcttcctctccttaccagtaaaaagtaagccccaccaataaaatgtaagccccacaagggcagagatctttgtctattttgttcactcatgtatcttcagaagctggaagagtgcttagaacctagaagtcactcaggaaatatctcttgaataatggctcaatgaatacacaattatgcatacaataaatagatccaaagtaatatgcttttgtgttcccactggatatcaggctacaataaacctgtttttaattagccagaaggtcatatgaataaatatacacatagggatacaaatcatgtcacatttcccctttaatgtctcaacattaacacataattacctgcatcttccaatagagcacagagcaatgggatcacccaccacagcaaccagggattgtgctcttgtgatggcagtattgagaagcttgtagttagataaaaaaccataatctaagtcctctgtggaatcttccagaagttgctctttctttttaattggtgtctgtttatgtttacaagtatgtcttgtacgtactgtgctaagaaacaaaactctgaattgctttcctacaaagaaaattttttaagaaaagacttaagattgtcattctgaaccactgatataataaaagcattgcattttttaaaatgttattgctaaataacaaacattggcgaagatgtggagaaactgaaacccttatgcactgctggtgagaatgtccaatggtacagctgctgtggaaaacagtgtggcagttcttcaaaaatttaggcagagaactaccatatgatccagcaattccatgcttacatacatactcaaaagaactgaaaggagtgactcaaacagatatctgtatatccacgttcatagcagcattattcacaatagccaaaaggtggaagcaacacgagtatccctggacagaggaatggatcaacagaatgtggcatatacatacaatagattattcagccttataaaggcatgaaattctgacacatcttacaacatggatgaaccttgaaggcattatgctaagtgaaataaaccagtcaggaaaggacaaatactatataattccatttatatgaggtagctagaacagtcaaattcatagagaaagaatgtagaagggtgactgccaggagggaaggaggaatgggggcatttaatgcatacagagtttcagtttggaaagatcaaaaaagttctggagatgaatggtgatgactgttgcacaataacgtaaatgaacttaatgccacagaacttatgtgcataaaaatggttaaaatggtcaattttacatcatacgcattttaccaccataaaaaaattttttttaatgatactattggaaccaaccttaaaattatctagtcccaggttccacccaatacaaggaccctttgttgaagcagtcatccagtctctggccaacgagggcacgcacagctgatttcataaagaagtctacagaaagtctaggtgtatatcattttttcttacgtgcttcaaatagtaacatatctattccctcaccctatgacaaatctcaatacaatgctgatgtcaatctttagtcttctcctctccaggccaaacaatcctagttttctcatggcagtgtcttgatcattcactaccctaagtctcctctgggtgctttctaatttactcctaatgttctttctaaaatgctcacctaaattctgtataatctggacaacacatggtacagtagaactattttttgcccatgctcttactgctgtatattactcttactgctggatattaccataaaacctaacattgtattaggcttcaattagagttcacatcagagtgttgcttcatatatttaaaagcacagattttatagcaattaattaaatgaacataatttaaaagagttgctgttaactataaacttagaaaagtctatacataaaaatctttatgaagaaattcatcctcagataccgtataacagcagaatgtgttatatactattatgactgtaattcacagcatacatatactatgtggcattgatataattatggtcacagaaaaggtatatttgttaatacttattttatttggatataaaaacttaataaacatgtaaatgaattcaacctttaattgccaaacctggcattaaagaacttgatatgaaatgaacacataacttcagaaaagagatcttgagtactaaaaatccaatgtgaacacactttagatttaagcatttgaatgactgaattcatttcaattgacacttaccttgaacatttagcaccctttctacattaacatcagataatctcttttttcgaagttcagcacgtattctaaacacttgatcagcatatggagtcaccacaccaatactgccatcatctaacttcccccacgctactggccacttccttcttaactcttctacacgttccaccacttcaaacacctttaaaaacaaacacacacatacatattaaagttatcaccaatgtttggagaaaataatatcgtaactaaaactgatttataaaggatcccattttagcagatgtcatttaaaaaaaaaaaaaaactacccctaaatgggagtaatgctttgctgatgtgaactgaatgagaatataaatttttcatttacattttaaacagtaaaattctccaataatacaaccagtgaaaacatgaaaatcagggacaatgctattggcccccaagttcctgtgtagggaggaacaagctcaagttcctgtgtgggaaaaagacaggccatgattctagggaaggcaagttctcacagccccagtaattctcagtccactctctccagatcaggccaatgaaactaaccaaccaactagaagcttcctgtcatcagtgacatcactaagtcccagcagtacaaggtctaacattgtccccttcctcactgatataactaagcagaccagccaacagccaccaattgacaacaaaccacagctgggactaggccacatttggatcacagagaaagactttcagaattcactgcctgctagtggtacaagtccagccaagccatttcattaaccttgcaataaagcaatgccacagtttatgcaactgaatttttcagaccccaattactggattatgatagggtttttaggatagtttgttctattttaattcaatgaattgatcaaacagtttcaatgtctggcacagtggagaaggtacaaaagttaataaaacatgttccttgcccgctacttactgagaagaacttatggtttatttagaaaagagagtcataataaaaaaaatatataaggcaagcacaaatagagggtcagtcaagagtccaggggcatacagaggaaggaggtgtgttttcaaatgtctttaagtacatcgtttctttattatttactaacagtatctattttaatttataatattaaatatatttaataaaaattgacaattttcatcctttgaaaaacttgaggttactgactacgaagcagttcccatgtccagatacaaattcagtgaactacagaggtaaggactacagtcatcctatcgttattatgatacagcagcaagtgtatcacatacacagactacccagggaaggtgaagagcaaactggactaaagacatggcattctcactatcaggaaacagagtagacatactcagtctactgcaataaggaataagaaaaagttatctttacccatgtggttagatgtggggatagatgagttgggagacacctctgctgcgccctcccaccccacagagttcccacctctaagcaacacacaaccatttctgcactttatcctcctgtcatgtagtcaaaaaacagacttagaatgatgatatgagtcattctgggaaacctctctcccagaaaaacatcttctaagctggtcaaaattagcaaagacaatcattcaaagtctctaaagacagatcaaagaggttacaagaaattgagaagcatccatctattcaacaaaacctgtaaaaactcactgagaacagtggaaggttgaggcctacaagctatggactgccccctttcccccacagctcttacagaactgttttaacggccaaggggcaattcccatcgccctagctccctcctattccaggtacttttggcagctggtaaacattggcagatttcatttttcacagctttgtgctgcagaaggcctatgataagcagttggtagtagtcaggtggtacccaacccccatctcctgctacatagggagtgggacagtgggtggcagtgcagtccctctttcccacatagctctgcattgcaggagagctgatccaatggccttggcagcccattgacagtttgcattttctctagcttcctaggacagaagacctatgctgggtagattcagcagccaatgaacatcagcagatcccaacctcccctgatgtgcactgcagaagagccacacttggtagcggcaccagctggatggaagcacctggatggcagcatggattacacacaaacatacagcatacacagagctcctgctccacaggatggatgcaggttgggaaaagcagtgaggagcaagttccatgtcctcccccaacaactgctccataagttctgcccaggagacggtgagcggaaggctcacaaactggcaaaattctgcctccgccaagagacctacggcagctggatcacaccgtggagcaatttatgcccccaggaagtgaaaaaggaaaaacattgaaatgaaaaatttattgccaggagtcaattgtagatttgaaataacagaagcatgaatcagcaaacgtgaagatacatagcggttatgcaatctgaagaacagagagaaaaagtaatgcagaaaaaatagcctcaaagaagtgtggaacaccaattaagctcaccaacatgcatctgatgggagaacaggaggagcgcaaagatggaaaggagcagaaaaaaggttcaaagaaataatggctaaaaatttgtcatatttgatggaaaacactaagctatacatccaagctcaatgaactttgagtaagataaacacaaggagacccacacccagacaaccatattaaaaactaaagtcaaagacaaaaataaaatcttgaaaacagcaggagaaaaacaactcatcacttacaaagaaattccagtaagactaacagatttctcaacagaaacaatagaggccagaaagcagtaagaaaacatatttcaatgtgctaaaagaaaaaatccaaccaattcaaccaataatcttatattctacttttcaaaaatgagggcaaaataaagacatgcccagatgaaacataacctaagagaattcctcacttgcagactccccttataagaaatactaaaggaagttcttcaggctgaaagcaagtgataccggacaataattcaaatccacacaaacaaagaatcttggtaaaggtaattatgtgggtaattataaagacagtataataacatatttcttctttctcctcttaactggtttaaaaagcaactgcaaaaacccatatgtatataattgtattgttaggctataatatataacaacgtaatgtttgacagtaacggcacaaaggaggtaggtaaaaaatgacaccagatggtaattcaaatccacaaagagaagtgaaggttaatacagcaaactccataaatatgtacttgccacccttctcttagaatttttaaaaaacataaaattatataaagtaataattataaaaatatattgagtttgttatatataggtatattatatataatagcacaggttgatctcctgtgtcttctttattgccttctttcgtattaagtgcatattttctagtgtctagaaatataacctttctattccctagaaaggaagggggaatagagctatgtaggagtatagtttctatagcccattggaattcatttaataaaaatttgaagtagattctgataaattaagatatatattgtaagccctaaagaaaccactaagaaaataactcaaaaaatataattaaaaaataattaaaagaaatgcctgggcatggtggttcacacctataatcccaacactttgggaggccaaggtgggtggatcacttcaagtaggagtttgagaccagcctggccaacatggtgaaaccctgcctctactaaaaatataaaaattagccaggtgtggtggcaggcacttgtaattccagctacttgggaggctgaggcatgataatcacttgaacctgggaggcgaaggttgcagtgagccaagaacgtaccactgcactccagcctgggcaacagagtgagactctgtctcaaaaaaaagaaaaaataataattaaaggaattaaaatgtgacactagaaaatatgcacttaatacaaaagaaggcaataaagaagacacaggagatcaaaaactacatgagacatagagaaaaaaagggctgaggtaaatccaaccatatcagtaacattaaatgtgaatggattaaaaaccccaatcaaaaggcaaagatggctgcaattccagaactttgggaggctgagggaggtggatcgcttgagcccaggagttcaagaccagcctgggcaacatggccaaactccatctctacaaaaaatacaaaaattagctgggcattgtggcatgcatctgtagtcccagctacttaggaggctgaggtgggaagatcacctgagcccagtgagctcacggctgcagtgagccataatcatgtcactgccttccagcctaggtgacagagcaagaccctgtctcaaaaacaaaacaaaacaaacaggcagagattttcaaactttttttaaaaaatcaagatccaataatatgctgtctatagaatatgcactttagattcaaacatgtaaacaagatgaaagtaaaataataaaaaaagatataccatgcaaacagcaactataaacaagctgaaattgttatactaatgtcagacaaatcaactttaaaacaaaaagctgtactaagataaagagggatatttatttatttattttattttatttttttgagacagggtctagctctgtcacccaggctacagtgcggtggcacaatctcagctcactgcaacctccccctcccaggttcaagccatcctcccacctcagcctcctgagtagctggtattacaggcacctgccaccatgcccagctaatttttttgtattttttttgtagagacggggtttcaccatgttgcccaggctggtctcgaagtcctgagctcaagcaatatatcgacctcagcctcctaatgtgctgggattacaggcatgagtcaccgcacccggccaaggagggacatttaaaaatgataaaaagaggtcatcctgttagggagatgtaacaattataaatatagataattaattgcagattctcaaaacatatgaggcaaaaaccacattctcctctatgcctcaggtcccaccaagcccaatgaattcattttgtatatctgtacaactctgtctacctctcagatcacaccatcttacggttattatccatagctcctcccttccaactgaatttttcaaggttaagaactataccttggcccggtgtggctgctcacacctctagtttcagcattttgggaagccgaggtgagaggatcgcttgagcccaggagttcaagactagcttgggcaacatagtaagaccccatctctacaaaatacattttttaaaaaaaattaactaggcgtggtggtgcgtacccatagtcccagttatttgggaggctgaagttaaaggatcacctgaccccaggaggtcaaggctgcagtgatcacactactgcactccagcctggatgacaaagagagactctgtctcaaaaaaacaaagaaaaaaaaaaaacatatctttggtgcttagtacttaaattgtacttttttttcaccttggcattgaattgaaaccatttcattactgtgggatataagttcagaatcaagaaaaaaaagaatgatctttctcagtctccttctacaattttaagcatgtgaaagaagacacaatttcaaatgatgtacaaagcacaagatacataaaataaaaagcatgttgtctaaacaaaggagaattacacacagcacatatgctatgagtattccttcaacttgaggttcttgaacttataattccaaacttttttatttaggttcattttgattttaactctatgtaagactatcttattttcctaatagtggaatgtaaactcttttcaaatgccctcctaagtattagtcagaatctttataaaagatatcattttcccctacgaatgtaactgatgccacttggtctgcttgttctataacacaaaatagatttgagtttcacctttaaattacataccatcaagaaaagcccagagcttctaaaatcatcttactgtccaaataaacctatattagtatccaaatatgcctatactggtattcaaaaattcaaaacgcctacactggtatttagctgaggtgaacagggtcagtccttgccccttgcaggaagagtcctggagcaatgtgtctcaaaatttttgactacagtaacttatggggctgaagacactgtctcaacaaccatgctctggtgaaagtcaaggtggtttgaaatgtctctaaagttacatgtttaatatttaaaggtcacacgacctttaaagtgagctgtctttgtgatcttttaatacgaacaaatattaaaaaaaaaaaaaaaacctttgagtaaaactgacagtccatgaaccggcaccttatttatcctatagcttataggtttcctgggaaacacaccaggtcaccgtgaatgaacaagtaacccaggctgagaaactgagtctctggcaaacatcaatcccgcctcaggatcaaggatcagggctcagctctgatccctgatgtcaccgcagggccaccaaggcttctggacaggccctggttgccacttcctgtcatccctcccacccataccatggctaatttctaggccagtggtttccaacttgagtgcaaaaacgataaaggagacccctaaagttattttcaatatttcaaatatttaaagaaaagtttaccttttcctaaaattaaatggcacagactaaccaaaatgtcaagtttctttgcttttggctaggattttatcaagtgagtactgatgatttttttgtactgacttctaactacaggcccatgagcaatgtcttaacggaaaaatgaattcctactacataataaaagccatttctttgtaaataatatgggtaaagcatggaattcaagggcagtgtagactggagatcaagagccatgccgcccctaatgatatgccatcctcgggcttcctgaagtccagaactcaactccctcctgacggacagaaccttaactccagggtttctggtttgttagcccctgaagacgttgccatttttttggtctgctgcctgacctgacccttcaaactactcacatgctctctgaacctaaaaagtcagaaattgcaagagaattatataagttggagcacatcatggaattgcaacatcgctgtctgggtccctgtgatctctttggagcatagaattctgcaattcaagtcttattcatttaaaatgatacacctcatttgcatatgcactataaaacttactcagagtctattttagatacctaacaataatgatctaattgagaacaatcttggtttttcttttgaatgaaatcatgtattttgtcttaccataagacaaaatgtaaatcaaagtttttgcttcccataggagattcatctgaacaaatcaatgttatacaagaaagaataaactttacatactatttacatgtaaatgaagtcaatatgcaatacaatgtcaacccaaaactttaaataaatgcttaacaaaactagacgatgtgactgagaaaatgttaacaatttacaaaaagaattaaggtacctctgcattattataaaaagctgtgctatttttttcttgtacatcttctcctcgtgctgtaaagaaagttagtgggtagaaatctttgtgtgctggctgcttcccactggccatcagtttgccctcatagaaaagctcagaggtataactgcagtaaaagacaaaaagaaaaaagggggaaaatctacatcaaaattaatttcacccataagaaaaaaaaaatcagtcgattctaataatattgccttatgtccatgattaattttactccaatcatctaatacttgtgataccaagaatttctccataaataacaagagtagggtcctggcataatattgttaaatggaatgattttggtaaggtacgaagccaaaacaggaagaaatgatgacagttcaatacaagatgagactttatgaggaaatttgctagcctgtatatttccttggttaatttttttttatttaaatgagtcacatacaatcatgtaccacataatgatgatttagtcaacaatagacagtacatatgatgatggtcccataagatcatagtactgtattttaaccatactttttccatgtttagatatacaaatacttaccattgttttacaattatctacagtattcagtacagtagcatgctttgtacaggtttgtaacctaggagccaacaggccatttacaccatataacctgtatgtgtagtaggctatgccatctaggttagtgtaagttcactctgtgatgttcacacaacaacaaaatcacctaatgacacatttctcagaatgtgacccatgattgtactaatacatgcaaacacaaagacatacagatgctggaacaatgtacacaactgaaagacagtcaagccgtcaactgtaaaatgaattcgctttactgatgaagacaccatctagtacttgactcatcagtgactgtagcaaatgactgaaaataataaaagaatcacattttgagagatacaattatatctatccaattgctttcagggaaacctaaaaatggttttcacatggctgacataatcaatattattaaattatactaaacttttttatagtgtaagtttctggtcagggtagtgactggaaaggagcacaaaggggcttttggagcactggtcatgttctgcttcctgatgtggattagggttacatgctgcacgcaggtggtgacaatccactgagttgttgagatatatacctttatagatgcatactatagctaacagaaatactttaaaacttattaataagtttcatggttttgtccctccctttctttcctttcttcctttcttttaaagcagattacttgtacaacatagccaaagacataagcaaaccatcatgctgtttgtcaatatatttattacagcatgtagcttttcatatagattatatatttagtcacagaaaaacatatgcatagctaacagaatctaaagttttggtttccagaattgcccctgtggtgttattttatttgtatgtgtagatatatatagatatagatatagacatagatatatagatagatatatattcatccacagttcctggctcataactaccacagctcttgttacagtcttttgttataatttgggtatgtcaggcctcaagaaacagaatctctctggccttctcctgccttcctttcacctgccccaaagcaggactctaatcttcccctgcctttttattcttatttttgtttttgagacagggtcttgctctgtcgcccaggctggagtgcaacggcatgatcatggctcactgaagcctcaacctcttgggttcaagaaaccctcccacctcagcctctcaagtagctgggaccacaggtgcatgccaccatgccctgctaatttttttttttttttttggtaggaagggggggtctttctatgttgctcaggctggcctcgaactcctgaactcaagcaaatctcctgcctcgtcctcccaaagtgattgtgggtcttaagaccctccacagagagggttccaccctatactctgagggaaggaatgctgacatcacaaagcttccataaaaacccaaagaactgggttcgaaagcctctagaaagctgaacacgtggaggttctggatggtggcgcacccagggagggcatgccagctctgcgcgctttctcccataccatgccctaggcactcttcatctgtatcctctgtaatatccttgataataaaccagtaaatgtaaataactgtttccatgcattctgtgagccactccagcaaattaagtgaacccaaagacccaaaaagagggtcgcaggaccctcaacttgaagccagccggtcagaagtaaggctcaggcttgtgactgctggggggccgggaggggggcagtcttctaagccctcaacctgtgggattggacattatttctggatagatggtgtcagaagtgaaatggaggacacccagctggtgtcccctgcggaactggttgcttatttgttggtggaaaggaattccctacattcgatcatacaagtcttctgtgttaattgttgtgagagagtaaaggaagaacatgatttcagagtttttcccaaaatagccctattctgtgaaaaattacaactctgacttctgaagttttcttttaaagacataaaattaaacataatttgcaagactagggacactatgtaagtgtgttgggaatcatctgtccctagcagcagtgctgttttgagttccctcctactatcagaccaacgaaagtatgacacggagggggcagttcacacctacttgatgatagcttcatgggagcggtagttctcacacaggagaatcctacatgggaactcagcagggtaatgctcatagagtcggtcaagtaatgaaacgtgaaggtttctctccctggcaaactcgctgtaaacaaaaggactgagctgtaacagacaaacatacagagaaagtttaactgaacatacaaatagtattttttaacctacttataaaaaatccactatgctaaaacttcttatatacaaaacttcaacatgctaaatgctgggacaagcacaatcagtaatattttctctgaaccattaccactactaagaacttggctaaaatttctaacttctcattgcagtttaccaacactaacccagagtttctttctacacctgacaaagggctccccagcataataatgaatagctactacttcagtgattccaggcatgcaacccactgtatcactgtgggagtcaaacagttatttcactaaaattgattaattattttaaatgatgagctggtaggacatacagcctaccactaaaaaatcattgttaataattaacaaaacaaccctcttgatcttatgaagtataaggagccattcatggttatgccttttactactaaagaacaaaattaaactactttaggcaaagaaatgaaaacagagcttgttcctctacatttaactctctccttgatgtcccgacagctatatagtatgatgtaggtccaatcttaactgcagcaggagacaaagagccccaaactgcaaccttgtaaaacaggtatcttcacagaaaaactgtatttctctttcctacatatagatattcaaatatataaaatcacactctttgacattttggctgtaatttaagccctctatttcctagttttctattacaccaaaaaaaattactccttcaggtaaacaaataatagagacaggagctggggaattacaattccccaggatcctacaggaatgatcatttaaatttcacttcacaaaaaaaagtaagaatcagatattcatactataaagaacagaacttaaataaataaacatgaaaattataacagtgacagactatccaaaaaagaaaaaagagtagcagaatagtaatttttcttcagaaataacagtatttttcactattagtacagaactatttgaagtactaaagttataatgcatggcataatgtcataggatgttttagaaatagaatattaaacatcaaaatataattaaaagttactttcaacacagcaactcagagggcacttacctgcatgtgatcaccagccaagacaatccgagtgttttgagttgctaatgctagaggcataatggtttcacactccatggcctgggcagcttcatctaatagaatgtgtgtaaaaaaccctagaaaatgcagcataaacacaggatagcacgctagagcagcaacaaaggcagaaggactatagttattttcttttctgctaagtaaagagtttagtttgctaatctaagagtattgagtacttttatttatttattttctttctttttttttttttttttttttttgagacagggtgtcactctgtctcccaggctggagtgcagtgctatatgatcacagctcactgtagcctcgggctcaggtgatcctccaacctcagcctcccaagtagctgagactacgggcatatgccataaggcctggctaatttttgaacttttttgtagagataaggtttcactgtatttcccagtctggctgaactcctggcctcaagtgatccgcctgcctcggcctcccaaagtgctgggattacaagcataagccaccacgcctggccccagatttgtactgctttttgatggttaagttttgccatatttatcagaacaacttcttgacatcttacatctgtacttcacataacactagtttgattttacatggttcctgtactcaaatataacaatcttaataacatgccataataaaacctatcataattatcatctctacagtatataatgcaaaagcattttataacaaaaatctgagaaaagtgtaaaagaaaaggaaaacaccaacactctccaaattggaattcttcatatgatcaataataaacatcatctgaccaactagagaataaatggaatagcagtcactaaaatgtctgaactagaggctggcaaatttttcttcagtaaagagccaaacagtatatattttagattttgtggaccatataatgaatctctgctgcaacaactcaactcagccactgtaacacaaaagcatctatagacaataaataggtaaataaatgagccagtaaaactttatttacaaaaacagtcagtgagccagatttggcccacacactgtagtttgccaatcccagtctaaactgaattcataagccctaaacttgtgagactgtgtcttgagtcagcataccaggttcaaggtccaactgacagaggtactgggaagtattcaaggtaacaaccaccactcgatgtttaagaatatcttctttctggggcatctgaaaggtggaatgtgcgcttgagatcaaacagtactgatgcacaactgggtggacagtctttacccagcgatttctgaaatataccctggaaaagaagaaaatatttctgatttacatttactaatttcttaacagtatctagttattaaaacactgacattgttattttaagatggtaatatctgaaaagttacaaatgaatctggtaaccgttagcactctattgaattagaatttaacacacaattgccactataaccactgtgactctctaccaaaaaaatgacagacatagaaagtatatgcagtaccacaaaataaacacctaattatttttaagtgttcagagtaatcttgcaacagaatggcacataaacgtaagatttataagcactacaattttttaagttcaaaacattcccattctggaattatctttttctagaacgttcttacaaaaatacattgactcatattttaactatttatgctaacaaaaaacagtgaattgcatacttataacaggaattcaaaggttattttcattttattttagaatatattcttatacctatacttaagtagacctctgtctgaggttctggaaatttaagaataaatttaaagtttgaacaactggaaagtcttaagtacttccattatttgcaaaagaaaaatattaataggcctcacgcaatggattattaaaatgacacagaaatgactcatccatccatctactcatccacccacccatctctaacctacccatgtaacaaagattcattaggtatccactatgctccagcacacaggcagatcacatagggcttgtgagcaatccttgggtttactctgagtttgatgaaaagccaacagagagttccaacagggcagtgacatgacatgacttattttgttaaaggactattctgtttctctgggcagaacatatatggtgggggtggatagcggtgtgctggtaaatattttaacacccggctccagggctaggaaggggagaggattccggtttgtagtgtttgctgatttttgtggtgtaaaactgtcatggtaatttcaagctaccagcatttcactgaacatgaacctgagaagtcgtacacgtgattagctctaacaaaccaatacaagttggctccaacacaacactgagcggcacggaggaaggagcagagggtagaagcaaggagaccagttacaaggttactgttaagagtgcagacaagagcagatggtagcttggattaggccaacaatagagatatgaaaatggtcagattcactaggcatttcgagagtaacgccaacagaatttactgatgaactagaagtggaatttgagagaaggaatgattccacgcctttgaaactggataaatggtgatggcgtttgcaaaggtggtaaaaaagaggaacggatttggggtgggaattcagaatttcgttttgggcatattcagtagatatccaagtggatatatccagtaagcaaggcaatacataagtttggagttcaggagaatgcctggggcaagatagctacaattgggataatactaaaccttgagactagatgagattacctagaaaataagagtagatttaaaaaaaaaaaaaaaaaacaactagtggaaggaagaatgactgatggacctctccaacattcagaagctgggaaaggagcctgggaaggagcaaagaaataggagagaattcaggagagcatggggtattggaagcaaaatgaagcaagtgtttcagatagaaataggagtaactgtgttaaatgctgctaagaggctacgtaaaatgaagactgaccacaggacttaacaacaaggaaaccaatatgatgaacctcaatatgatggttttagtgtaaaattacagatggaaatctgattagcttgagctcaagaaagaaagagaagagaggaggtagtgccagggagtatatatagacaactgtctggataagttttgcttaaaggctgatgcaggtcgggtgaaggtgagtttttgttttgtttttttaaacaagacacaatagtatattttcatgctgtacaaagaaaaaagtatgcaggaaagaagaagctgtgtatccaggaaaggatgagagctcgttcacaagaggagaggttggcccctagaaaagaacagtttagaatgggagggaaagtagttactaaggagatgcaagtcagatgctctatcaaagggaagatgtgggcattctcttctgatggcttctactccgtcagtaaaattacaaagatcatcagatgattgttattttcatcactattattcctcttccctagttaggaaaaccaaagcccaaagggcttacagccaggatttaaacctgttcttcccctctctaagcttcatttcttatttccaaaatgagtataataattcaacttcttaaggatttggggaaatcaaatgagataacagatgtataatatgtagcataatgcctggcaccaacaaacagaagcccccccacttcccttcacccacagcaaagctgaaactaaaatcagcatttctaaacactcagttaatattcaatgtacactgcacaaatgcaaaaaggtagcatcatgatatgaatataggcaatcaaaataattatttaaaaggtatgttgtttactccatctaaaagcacatattgtgcaaagtattttatttaataagtcatcatatggaacaaaaggataatttctactcagcttccaaaaaagtttaagagcaaaatctggtgcttaattggcatgccttcagttagtctaaaattttggtaataatttccttttctcaaagagccaccatttgttactaggctcttgtctcttactttgtattaatgtttctcaattttatggcctctgcacattttactagagcaaacttaaattatttttggaagcaaaccaaaaaggtttttaaaaagagtaattattaatattttggccaggcgtgatggctcacgcctataatccaagcactttggaagcctgaagtgggtggaacacttgaggccaggagttcaagaccagcctggccaacatggcaaaaccccgtatctactaaaaatacaaaaattagcctggcatggtggcaatgcacctgtagtcccagctacttgggaggctgaggcacaagaatcacttgaacccaggagatggagtctgcagtgagctgaaatcacaccactgcactccagcctgggttacagagtgagactctgtcttaaaaaaaaataataataatttaaaaagtaaaataaaagagtaattctttttattgtctgatactaattactaagtaattttttgtttctttgtttttcttagacattggaattctattatagtaataaatcttgaaaattgctattaaaagtcagctttaaatattgatttcttaaataagaaaaatacaagcctgaagttgataatcattttttattaaaaatcatatcaaaacatgtttttaaattcttcgaaccaaaattgagttcatttttccatttttcattcaattcaagaccatgcttgtaagtggtatttggtgagggggaaattttacacaatgtagataatctagacttggcagaagaattataacctctatatcataagctatgtataatcattttcttaaaaggcaagcactggctcacataaaaacatctctggatgcatcaaagttaatcatgaaaaaaatcctaatgatttctgatcctggcctacctgtctaaatatcaacttactggtaagcaaatactaaagaaaaactatgcagttatgagccacattttaaaactaaaattccacccatcccccagatgagctattaaatctgatagtagaataaaggcattttcagatatgcaagagctaaaaaacattacctcttacgaactttgtcagaagggttgaaagcactagttaagtgtgtgtacaaaaggatgtgcaccatcaaaacaaggtagaaaatcaagaaagaggaagacctaagatccaggaaatgggatctaatataggagagaagaaaaagaaattccaaaataatggcaaagagaagtatcagcataacaaagaacaaccagttcagaaaggaggagcaagtgaaatccagaaggggagtttccaggagaaaaaaacagcactgacaaattatctaagagctgtaacaatgaagacttgttgtggcaggtatttacagggttacttagggtgtaaagacctgattagatgttcaaagaaaataaagcaaatgaaaaacagtaagtattattaatgctagaacaaatccaaaaatgtatatgaaaggaaatatgcatattatttgttaggagcaaataacttacaggatcataataataaacactaaaaatgaagctaccatacactttgggaggccgaggcgggcagatcacctgaggccaggagttcgaggccagcctggccaacatggcaaaaccctgtctctactaaaaacacaaaagttaactgggcgtggtggcgtgtgcctgtaattccagctacttgggaggctgaggcaggagaatcgcttgaacctgggaggcagaggttgcagtgagcccagatagccccactgcactctattttgggcaacaaagcaagactctgtcttaaaaaagaaaaaaaaaaaagaagctacaatagaaagtcaacaaatatccaaaaccaaattaagacataacagttgatatatgtatgtgtgtgtgtatatattatacatatatacacatataatttttatttttatgtattatatattcataatttgttatataatatatacacacataatttttatatattatatttataatttagaaaaatggaagtatcaaaagaaactgctaaaaaagtaaaaaattcccttgggaatgatatttggtgaacaatggctaggttaattaaaaaaaacaaaacattttttgctaccaactttaaaatacaacatgaccttttgtaatagtgtatgcatgtgattttttaataaatataaatactaatctaaaacaaaagctaattatttgagtcattatgagaaaaaaaattaccaatatttgaatttaacctgtcacttacaggtggctttttaaaattaaaattatctagtttctcccatataaaaagaatatttacttaaatcctcatattctcccagccactgcccaacctctcccctcctttcacagccaggcttcttagaagtattatccagattgttctctccagttaccaacctcctattcactcctctaaacattcaacatggcttaccctccatctaatcaagggacataaacaacttctacatcactaaatcacatcgatgtttccaggcccagcgagttacctgacttggcagcatgcaaagttccgctgttgctccctcccaggaactctcccctcagcttccatgactcaagctttctctgcttcccttctaactctccagccctcctctcccctaacaatctcatctatgctcacgcttcaatcaccaccaataccctagtgactcacacattttctctctccagccaagacctcacctctgagctccaattaatatttcattgtaaaattgaaaaaaaaaaagtggtttttcaaattactcatttatatagtatggatatttgttcccatcaaaatctcacgttgaaatgtaatccccagtgttggaggtagggcccagtgggaggtgtctgaatcatggcggcagatccctcatgaagggcttgggccatccccttgatgataagtaagcttttgctctgaaatctggtcttaaaagtgtgtggcacctcccacacgtacactcactctcacttgctcctgatttcaccatgtgacatcctgctcccccttcgccttccaccacgattgtagcttcctgaggcctccctagaagctgagcagatgccagcaccatgctttctataaagcctgcagaaccatgagccaattaaacctcttttctttataaattatccagtctcaggtatttctttatagcaatgcaagaacggcctaatacactcatcaactaactccaagcacctgcttcttcctcaaagaggggggaaaaaaagaaagaaactgaagttctaagtctcactgctgacgttttcacaattaccttggaaagctacctcaagttgaagctagtaagaatacaaagcttgatcgctgagccaattttcttgaaagcataatattctagtcccaacttttaaaagattttaaaatattctctgtactttcattttgtgcaacatttaagttagacactgtctaaaagattatttaaaacacagccaacatttttttaaaattggagaattgacggtaacaagacagtttcaagttcacagtataaaatataagtaataccaattaaggaatttacatattttccagaaagaaaccaatccacatatcccacacgaattataagagagagtctggtaatatataattttaattcactgaaattttattcctgtagtaaatttatatgcaacaaataacccccaaaatgttattacttaaaagactatgaataagaatgacctgatcacagaagaatatgcttctttgaagatcaatataaaacaacaattaccttccattttcccagaaagcaggaaatacacccctccatagatgacctctatctgcaaagccataaatctgccagaaccagatactgatcttgagaaccacacacaaaaatattttcccctctattccattttaaaatcttctagttctagtgaagaagtaaaaactgaaactaaacatgatctaaaatggtttctaaaatctccatctccaaatattttaagttcagctcaactcctggcaactaaaagaattttacaaattttaaccatgaagtatgtatatttaagcacatttacaactgtattcactatgtaatgttttgactattttcacactatagcactttccagggcctgttccagcctatatcatgaagagagcaaactcttcatgagccttgctccctagagacacccatcttcatggtcatgagcagacacttagtgccctcttgtgttctttcctctgcatcctgggacaattcagataaagctaatcttcccagagcactcagtcattctaatcttctctattccatttcacatgcctcccatgtttgttgtctattagaaaaattataaattaatgagttaatgtaataatagtgctaataaatctgaactcaatgcatgaatattcttaagaaatacatttgcaagttaacacctttcccaaagagaaaaactatggcaaaaatgcaggactacataaagaaaatatttgggaagtcaggctttttcttactttattccatttactaaatgaaatcacatgaaatttgcatttgaatatatttataaatgtttttccatcttgggctgaaccactttcgagacttacagacaggtgtaagtctctctgtaagttaaagggcgagtctcgatacttgggccacaacaactatacatgtaccctactgaacataacttcttattctgcatatctagatgcaccacatgtttgattataacctccaaaaaataattttacatggaaaaagctaaatataagctagtcgagtgacggatttagtgttcatcagcaacagctctacagccccaagtgtcaaatgacctatgctaagtcgaccgagatttgagggggctttactccactgttttcacaccaagtacaccacgataactgagaaggtcacacttcctatgtaacacacacatgctcactctaccaacaatataagtgaacaaaacaacttatatcattaaagtaagaacacctatagcaaaaatgctaactactcaactttcacttacaagctcagagattagattctgaagcaaactatttattgatgaatgcatccttcaataaataccatgttttcatttacagtgatagtgattgtatatatgtaatattttctcattaaatacaaccagattctatttaaaataattactgcttcttaatcttccaaagtaaaaataaaatatggcataaaaacccgtgttaatgggtcacaccacttttttcctcttttgtttttttaatggaactctaagatcattcaaacagctttggttatgattactgaagaattaaataacataatttcatttttccatgcttgagctcaagtagaaataaaacgttagtgacttatgattcaaaagtgcagttagaaattaatttataaacaattgtattcaaacaacctagggcatgacatattagtttgtaaaatggcaaaactaaacattaattcatataacaatgaaagcaaatggtataataaataacaatttgatgattctttattgttttctgaagaaaaggatttttattcccccatatcctatatttaagtacatttcatgtccatatatactcagaggacctttctatatcaaccttaaattttctttgacactttgtctcttaaatggtagcaaaagttgttaaataccagtcaagtacattttgttgcagaaatcatttcagtatttcatgtttatctaatgtgtagcttctatgaaattacctgcatgatcacagccaaaattttattttcataaagaactgtccactgcatgactaatctgccatgcaaaatatgttagaatttttactgaactagatttaatttaagttatcatatttatattatttcatcatactagcttttagaggtacatatcaaaatctactcaggttgaaacaatacacacaaaacttaaaaaaggatgtctttctcttacttaatgtttaagaaatgaatagtcaaagatttttacatttttccttaatttaaacagtttcttcaaaagacataacctctaaatgtcaatgcataaagactttggtatttccaaagttactaaaatctttacagacaccttttcttaagaataataaagtatgatacagatacataataagccttaaaaaaaatacctgagaggtcttgcctggggattgcctgcttctacatatggatgtaaataatcctttatgtagagatcagcagcactattagaatgggtgcaaatgagaatcctgctgaaataaatggtgcaaataaaaagaatgataaaacacaaaactattcaagcagtataataccaaaaaaaaaagcagtggccatcctaatattatacaattcccttaccctactcagtaatccctagcattattcagtgatacctttaggaaattacactactctttaagttaaaaaggaagtaccccaaaattatttttaagtctatcatataaaatatacacatatatttaaacccaagtcttctggctctaatagataccacaattccatagcaaacttgttctgatggctatttaaaaactattttaaaacttactgtctatactaccaattctaaaaacagtatgttttaagagaattcaaatttttagtgctctggggtttggatttacggcttttccttttctctttttttcatgtttaagagctgcatgaaaactgtcttgctagccctcattgtgtatttaaaacaagaacagaggtagtatcctaccagggaaatatgagcacgcttcccaccctctcacctagtctcctgttgctgcagaatatgtttgacagcctgagctagagtgaacgttttgcctgtcccatagggtccgatgataagcacaggcggcagctggattgcaagtggagtggtaatggccagaacagcctctttctgttttgcatttagtcgaggatccaactgttcatcccattgtctatggaaaataaaaatttatgttaaacacatgcatctcgttaataaatagaacataacacacgagtatcgtgaatttcagtgaaccattaaaaccactgaaatagcatagcatctataaaaacaaatgcttattctaaagctactttttataaagttacccaacagagtcagtgtagagtgttttaacgtgtaaatcaaaattaattttatcttgtcctacactacgtacaaaaagattttggtaactaatctaaggaaatcacatacttcgaatctagctgctgccaggtctttaagtagaaatggcaatgtttcaaaaatgtaatttccctctgttacaaaaaagcatcagaaaactttttactgatattaattaagtagtaggtttttttgcataacaaatgaaatgcaatagggaaactatctgaatttcaaattctaattatttaaaagatctgttggtaaggtttaaaacaagaggaaaagaacaaatctgtatgtccctggttaagagatcctaatttttacaaagatcttaatgtagaaaatattaagttttttaaaaaggcataaaaagccaaacaaaataaaatgttttttaatatttttgcacacacacacaaataatacacatattatattggtcaaagtagagaacacctgtcacagtcgcacagatggctactgtaatgagatctatcttactagtgtcccttctatgacttggctaagttttgaagatttaaatggacagcagatactgaaacacatcaaactgagtggagaatcaacagcattctttctcacaactaccgttaaaatactatacgtcacaacaactatggtaaaaatgagagggatgtgaatcaaaatagtaagggtgtgtaaagaaactcttagaaaatttaaaataaaagtgcctgcaaaataaccctcaaatagaggacagagtttagacaggaaaattctctctgtgaggctatattgtacttaaatcagaaggtggttatttttgaaaaatcttaacgctttcagttttcaagaaattataacctggccaggcatggtggctcatgcctataatcccagcattttgggaggccaaggtaggagcgtcatctgagaccagcagttcaagaccaccctgagcaacacagcaagaccctatctctacaatatatatataactgttatattatgacatataatctcaaaccaacaaaattctccttaaaaaatgtaaaaccttagaaaacaaactttgaccatgtaatcatgccaatattttttctgaaatttgccatttgctaaatctcaaacattttatttcagagtccctcagcattaaccggcttatttattcataattctgccagtatccagcaattttccatcttctataaatgaaaaaactgcttcaggtgatggctaagtccagatctaatgtatgtagcattagatgaaatggttaccctaaaaccatccgaggagccttctcccctgccttactctactgttgagcctagccagctctaatgctccatctcccagcctcctttgctacagacccaattctgatcaattagatgcaggaagaagtcctgagaaggacttctatacccaataaaataaaagcaaagccttgcttattgttaattttttttttttttttaactaaagaaaggccttcttgctcttcacttccttccacagctgaccaggaaaagtaaataaactacagcagccatcttatattttgcatgaggcaaaacacatcaggaagaaaatgaacatgccctacatagtagaggagggtgaggtgtctgtccatgatggccctgcagagctcctgcacagccctggaccacatatctctaggctgataactccaccttttaaagccacaatcagttcagtaaactgctacttcaatctatacctgaccactgtgattctatgatacctgcccccaatggttcctttatctgtgcatgaagataatgacatttgcatcagatggttattttaaagatcaagtgagataatacatgtaaagctgtttagaaaaataattgagcaacaaaagctcaattaaggttagcttgttactacaatattttatagagattacagaaaaatgagatattacttgactagtacatgctttcaaagcaaaaagttcttaaaacatcctttcatctttcaaatctgaggactttaatgaacttaagaatgagacagatatcatgataaacatttatagaaagccaatgagtggaacaacttgtatttatttatcaaattcttagagacccaacttagtatctttttcttttttgagacagagtctcgctctgtcgcccaggctggagtgcagtggcgcgatctcggttcactgcaagctctgcctccagggttcacgccattctcctgcctcagcctcccgagtagctgggactacaggtgcccaccaccacgctcggctaattttttttttgtatttttagtagagatggggcttcaccatgttagccaggatggtctcgatctcctgacctcgtgatccacccacctcggcctcccaaagtgctgggattacaggcgtgacccaccgcacccaacctatttatttctttatgtatagagatggggtctatgttgctgaggctggactctaactcctgaacttaagcaatcctcccacctcggcctccccaagtgctgggattacaggtgtgagcccattaccattacaactaatagtttctcagtatgttcctagacccagataccttttaattgctatttaaattacagtggtataaaaatcttttcctgcttgaaagtttgcttacttttgcagttaaaacttacagtcagtagtatttaaatatactacatcatatacaatgtaattttcagaagtgagcatatcaagaaaaatgcctaaaagcttactggtatggccttacaattgaaacttttcttctttaaactcgaaattcttatgaacttaaatgtgccgaatatgaataatatgtaaaaccctgttggtattcaaagaaaaataagacgcagtctcttcctgtacaaagctcagagtttacccagaaaaactgtctagaaatgttcacgaattaattgataaactgagagaaattatgcttgaaaacacaaaactgagcctagcgcatgtcaggcactcaataaatagttgttaaaatattgacatggaagggtcaggttcatctgcttgaggaagagagcatatgagctggactcaatcttaaaggatagagagatcttcagtgaattaacattgggcaaagattatatgagagacagaaaatcacttaaagaggaggcaaggctgcaggaagggggaaatgagttgtccgatgggtgtatagtatcagttctgcaagacgaaaaagttctggagattgcacaacagtgtgactatatttaacactatggaattgtacacttaaaatggtaaagagggtacatttatgttatgtggattttaccacaattaaaaactttttaaaaagaataacataaagataaggaggcaaataagtacagggcaaattaaacaaacttcaaggtaattcaacattgctaaaacatgagagtttagagggagaaaaggagtgtcaagtagaaaaaagtagaagaaatctgaaaggatactgctggaaagcacagtcaacgaggccatacacaggcgctttggcttagactgctcaccctttatctacatatcaaggagaagccatcagatttgtgagcagtgaaatgacatgattattttagaaaactaactctgggagaaatatttgtgatgagccagaaaacagggccacagacaacaggacaaaaggccaactagaaagctactgaaatagtccgggtctaaaagcagcactggctctgagaatgaaaagaaaaggaagcatgaagaggagctgaatccgaagagaactgggagatgtcactggatttttacaatcagtagatcaccaatcactttcaggatagtacacaagaggaaaacagaggttacagagtgaataagaaagaatactggaaacacgcagactattccctctcaagaattttggcactaaaaagaacagaggggactgcacagtaagagtaagcaaaacaagggagaaatgactgaggttttgtgttgtaacgcatatttcgtgttgttctgtttttaggaccagaagaaatggaatgtgaggggaagtgatatataccactcctaggcctggcccataaaagcttcccacgtgaccctccgtgctcactcttcccctgtcggccagctgaacgtcaacacccagggtgaccctggaaaccacttactaaagatcccagaggctccattagtcttggaaagggccatcctaccatgattgaattgacacagtgataaataaacttctattttgtagagccactgagattaaaaaagaaacaaaggtgttgtgagttgagcatgggcaggtgctaagggcataaaacccagtgaagagatgaaaagacagatgcaggcatacagctctcactgtcatccatgcttataacaaaatggaagtaccttcttcattacatgtaaagacatcccaaaaaaatttaagcagaacaatatttatacgaccattaactggagagcagtttctgaagtagtttcttctatcgtacttcatccattttgataatttctaaaaatctctcctatctttaaaaattattttaaattaggacatgtgtagtagctcacatcccagaactctggcaagataaggcaggaaggtctcttgaggccaggatttcgagaccagcatggacaagacagcaagaaccttgtctacaaaaaaaaattttttttaatcagccagacacagtggcatgtgtctataatcctagctactcagaggctgaggcaggagagttgcttgagcccgggagttcaaggctgtaatgagcaatgatcatgccactacacttcagcctgcatgacagagcaagaccccaactctaaataaataaataaaaattattttaaattaactactggaaccactttagaaaggccctaatttccccattcaacttctacttggaaatattcctaaattgcttggcatcctatcaaattaaggctgttgagaaaagcagtagaattcatttagactctgagaaaaagtaatgatgaacctcaaatgtttcattttaagtgttcttttactctcctttctaaaccaatatctcctgaaaagcaaaggcaaactttcttataaaagtatgcttgagttatttgatacagatattcaatttaatattaacctaacttcctttaataagatatcgcctttttgtacctgttaggactccatggtatggtgggagtcatactgatgtctggaaacaaaaccccattgtccttgatcctgtctagtgcatagtgcatttcacagaggggtaatcgatttaattgaaactgaagttcaacctgaaagacaaaatgaatgttttaaaaactgcatgaaagcaaacatcaatgctggcagctcactagaatactttgggaggaatctgtttgggacagtaagtttagagattcttttaaagtataatcatagtctaatcataattatgatgaataatatttgctttgttcatttataaccaggcactgtaacaagtactttactatggattatctcatttaatagtaccaatgatatatatatactattattaacatcattttacatattaagaaattgacatatttgtaagttacctaatctctagttaaaggctactttattctaccattcccatgaaaatacttttgcaaaagatcagaacatgtgaagtatccagtcgtgagagatgattagccctgatactctatcaatttacaattaataaataatgttcaccaagttttatgtttaaaaagagaaaagattagtcttccagttaaatatggcagactgaagacataattcacctaaaaacccataaagatagaacaggaacagatacaactgcagatgagagatgtcccaggaggtagcttacatagtttcttttcatcttttcttccattgctgatttaaaactctaatcagaaagctcaaccttgtataacactggaacattctaaatgttacttatatttaaaagaatcacttttctctgggagttactacaggtgcaattttcaacccaccactgtagacttcaaagtcagctttgcttttgtttacggcagaagaaaaactaaaccagaggaagactacgagctgataatgaggctacagaccactatggttaagctgcaaccttcaaacatacctgtgtgtcacagtcaggccgaagattaagttcttcacagcattccctagatagccttaaaaatatatattcctttgttttttcttcaatagtagcttcataaaccttctctttggttccctgggtctgtactaacttctgtttagggactggtaataaataaacagcattgactttggtcatcaccagtcgtccagccaaagtatcttcagaaagtgtttcagtaagcttaaagcgaccaaaaagttgtccattctgagcatactttgcacctccagaaacaccagtgagcatgaagcttgccagaatctgcaattgcactttaaggttgaacctaaaccagaagtagaaaactagtttgaatattttacatcaaaaatatataaaaactagaagagtgaaacaaagtaaatcaaatataaacataccaaaaattaaaccattatatcaattccacttcattgagctaaaaactgtatttttctgcctttaatacaagctggaaacaacaaaaaaaaatttttttttttgtttttttgagacggagtctcactctgtcgcctaggctggagtacagtggcacgatcttggctcactgctacctctgcctcccaggttcaagaattctcctgcctcagcctcccgagtagctgggattacagatgcccaccacgcccggctaatttttgtatttttagtagagacagagttttgacatgttggccaggctggtctcaagctcttgatctcaggtgatccacccacctctgcctcccaaagtgctgcgattacagatgtgagccaccatgcctggtcaacaaaacttttttttaagtgaataaactcccatgtaagttacataaagatacaagctaagttgtgttgaagaatatgcacattcaaaaaacacctgagtatttaaaatgaaactaaatgttgttttttaagtaacatgaaatattatatactaattaatataaaagtctgaacacaccactgggacaataaagactttaaaatcacctggaaccagaaggaaacacattgcattgaaaattacaatggactttaaaccaattactttccaagtagatcttaccagcagattctagccataaaatatctctttcaataatgttaatgaataacatttaaaataaattttcattcatggctacatggaggcaggtctcatgcaggaattatggcaagagaagttaaggcctatcttatcagacaatggttggtatactccctcacacttccatgtgtgcacgtgagtatgagagagtatgtgtaaaggcagcacagagaatcaagattaatttacacagtcaagaaatatggagccggacatggtggctcacgcctgtaatcctagcactatgggaggctaaggcgggcagatcacctgaggggggcagttcaagaccagcctggccaacatggtgaaaccctgcatctactaaaaatacaaaaattagccaggtgtggtggcaggcacttgtaatcccagctactcaggaggctgaggcaggaaaatcacttgaacccaggaggtggaggttgcagtaagccaattatcacatcactgcactccagcctgggcaacagagtgagactctgtccccaaattaaaaaaaaagaaagagaaatatgaagtgaaagaaagatgtaaactaattaacagttctcctttgctgttctgaaatggtgctgtaagaggtaagacaacatggtaagaaatggtggcaacattttctcctttttcttaggtttgtcttagtctgttttgtgttgccgtaacagaatacctgagactggataatttataaagaacagagatttatttcttacagctctggagaatagaaagtctaagatcaaggggctggcatatggtgatggtcttcaggctgcatcatcccatggtggaaggcagaagggcacgaaagtgtgagcaaaagcaatggcaagagaggactgaattcactcttctaacagcccactctcatgataaggagcccattcctgtataatcacattatccactcatgagggtggaatcctcatggcctaatcaccttttaagagtcccacctcttaatactgtcccaatggcaattacatttcaacattagttttggaggggacattcaaactacagcattctgcccatagcctccaaatgcatgttcttctcacatacagaatacattcattccatcccaatagcccctaaaagttttaactctttccaggatcaactctaaagtccaagtccagagtgtgaactaaatcagatacggataagactcaaggcacaattcatcctgattcaaattcctctccagttgtgcctgtgaaattaacgagttacatgcttccaaaatacaatggtgggacaagcacaggataaacattcccattcccaaagggaaaactaggcaagaagaaaggaataagtggttccaagtaagtccaaaatccaaaagggaaaacaacattaagtcttaaagctgaagaataatctcctttgcttccacatcccacatcctgacacactggaacagcagttgggcccccaaggcctcaggcagcctggcttctttggctttgctgggctcagtcccccaagaagctctcacagattgaaagtcttatatagctttcccagacgagagctgcataatgctgacccttcagttctggagtctcaggatctagcccactcccagggctccattaagcactgtcctagtggggactctgcacagtggctctgcctctgcaccaagtctccgcctgggccctcagactgttcaatacatcctttgaagtctatgtggagtgaccattctggccaacctggtgaaaccccgtctctactaaaaatacaaaaattagctgggcgtggtggcacatgcctgtaatcccggctacttgggaggctgaggcaaaagaattgcttgaaccaggaggcggaggttgcagtgagctgagatcgcgccactgcactccagcctgggcaacagagcgagattctgtctctaaactaaataaataaataaatagaacaggaggccaggcatgggggctcacacctgtaatcccagcactttgggaggccgaggcgggaagatcacttgaggtcaggagttcaagaccagcctagccaacatggtgaaaccctgtctctactaaaaacacaaaaattacctgggcgtgatggcccggcctgtagtccatagctacaagggaggctgaggaaggagaatcacttaaacccaggaggtagaggctgcaatgacctgagatagcgacaccgcactccagcctcagtgacagagtgagactccatctcaaaaaaaaaaaaaaagagcaggaacccttacttatttcatgctttctcaaatgaagttaaaattttactttccttttactacctatataatatgcagagtttaggggtcattaaaactttctcagagggaggagattacttatagtgcaagaaattcttgattcacaaagaatcatagcaaaaagaatctttttgctaagatgatgtacagttttttttttttttcactatacagtcaatgtcttctacctttgaactccctcttccaaggacttctgtatggtaatactctcctagttttcttcctacctctcctagctgctctccatctcccatctaagcaccaactattttctataagctccagcctgccttccttctactctgtaagttcttgataggtcaccctctcccagatctcccagctcagggctgtaaatccaactgtcaaatggacacttttgattacatgccctttaaactcagtatatgcaaaactgactacctgacctccccagtgtgacccaacccaatcttcccatgtattaacaacttagaaaatggcactgtcatccacgtaggtatccaagccaaccaaaaatcaagtcatccttgaccctgcctctcttaccaaccttcattcacacatcacagaatcactgtgccctgttacttcctcatagccctgttagttcccctccttcctaattcatctgcatcccaacatttttaacttggattactataatagacttctaacatgacttcttgtctcaaatctgttctccacacccccatcagaggatctctgaaaaatgcaaatctggtaagtagctttctatagctctgaggacagagtttctctctcatttaccctgtccccaccacacaagcaccctccattgcaactataataatcaactggcagctccccaaaactctatgctcttattctcacatcctgtttcctttaaccaaatacttttgtcctccttcttttgttttgttttgtttttttttttgagacggagtttcactcttgatgccccagctggagttcaatggccccatcttggctcactgctacctccacctcccgggttcaagcgattctcctgcttcagcctcccgagtagctgggattacaggtgcccaccaccacaccaggctaattttttgtatttttagcagagacagggtttcaccatgtttgccaggctggtctcgaactcctgaactcaggtggtccacccacctcggcctcccaaagtgctgggactacaggtgtgagccaccacacccagccttgtcttacttctaaacctgacaaatcttacctgtttttcaaagttcaacttacattccatctgcttgagaaagcagatgtgagcccctccttgactaccctccttttctccactaagatgagaaagtgcctcttccatggggcccttgtgcattcctccagtgcagtgctgagcacattttattataaccctgtatttatgagtctgcctccactactggattacaaacttttgggggacaaggaaacatattttgcttgccttagaaatcagcagtgactagcatagaacctaacaccttcaacattccataaattttgttcattgaattaattttatgtttttctaataatctgatttttcccaagcaccatattcccactttagccactttatattatttcctaacatattcttgaaatcctgtcatatatttctcaactatcttgggccacatatattttttaatagttttttgttttgttttgttttttgagacagggtctcactgtcacccaggctggagtgcagtagcacaatcttagctcactgcagccttgacctcctgagctcaagcgatcctcccctcagcctcctgagtagcagggaccacaggtgcacaccatcacgcccagctaatttttgtattttttgtagagatggggtctcgccatgttgccgaggctggtctcaaactcctgggctcaaaagacctgcccacctgggcctcccgaagtgctaagattataggtgtgagccactgcgcccaggccttaggccatatattaaagtttcactcatgtctatttgagaatcaccatcccaaaacacttgatcacaatttagcaggcatgaaaagttaatctcacagtttagagcaacaagagaatcctcttgtgacattggttgtgtcttgcaacaaaattcttgaggtagaggcaccagaagtgctaagaaataaaataaaataaaagtcctaagaaatgcagcttttcccacagaaaattcatcacatgttcaagatgcagacattatagactttctagtaaaggttatagctatactaataattaatttgtataaaagattaacaggctaaaactaaaattatgttagtaatcttaaatattaaaatatgtactttttgaaatttagtaactcagaaatacctaaactagaaaatatatcctacaattaagaaagatatttcttaataagaagaaaaaccatctttccattgttgcatgctacattttaaaatcatccttaaagtttacataattccctaaccttttagggaatgacagaattacagccaactgaacactcaatagactgaaaaagatacttccatgctaatgagaaatatggctctatcaaccttagtaacaattccatctcttgagtgcaactttcaaaaaatttcaaacctatatagggttttcatttcatgtgatttctgactatatgaacaataaaaatctaacaaagtaataaaacaatccctgagtttactaaagcagagcgacagaactgaggtgtcaccaatagaagcagcacccatctaatgatgaaatgtgcaccccacactagacctgtcaccaacagaagcagcacccatctaacgatgaaatgtgcaccccacacccatctaacgatgaaatgtgcaccccacactaggcctgtcaccaacagaagcagcacccatctaacgatgaaatgtgcaccccatactaggcctgtcatgccagctgttagcactgagaagccaggcacaatgacccaatgaggcatgcacagtttaatggacacaatagcttcagctaaagcacatttcctttgaaaatgtatctcttaaaatcaaacagatttcacttcaaagtagaatcattattgaacacacaccaacatgtgactgaggataagagaagtaaaacaaatctcaaaagaaaagcattttctaaaacttatatgaaatatagtattatctttatcacgtacacacatctcacactaaaacaacctaagaagaaatttctggactgctttgaaaaaaatcatcctttaaaaaaaaaaaaaaaaagatagattattaaatccagtctcaaaccaaaatgtattttatctaatcttgagagccttttttcaatctactttctaggaagaaatgctaaaatgaccatgtaaaaggcacagtctgatgggatcttgctctgttgcccaggctggaacacagtggtgcaatcacagctcactgcagcctcaaattcatgggttcaagtgatcctcctgcctcagtctcttgcaacccttaccatcaaaatgtaagaaactagtatgaagccccttgatactactttcgtgattagaaatattctgctttggccaggcatggtagctcgcgcctgtaatcccagcactttggtaggccgaggcgggcagatcacctgaggtcaggagttcaagaccagcctggccaacatggtgaaaccccatctctaccaaaaatacaaaattagctgggcatggtgacacttgcctgtaatcccagctactcagaaggctgaggcaggagaatcgcttgaacccaggaggcggaggttctggtgagcgagactgcaccattgcactccagcctgggcaacaagaacgaaactccatttaaaagaaaagaaaagaaaaaaagaaatattctgcttaaactgtcaaagttcacagaggactcatacattctcgggaccttgggaaatatcctactaattgtgtggcagcagatctgaccacgatgtcacaaagaggcaaacttcaatgtgttcagaacacacttattattgtcaatacatgtccaagtcatttagagagatgagtctatataagcataccattgtctcctacctttaaattgggtctcaaaccacaacaaaacattcttcatgattctaatggtgatttgggtttgctctgatgactggtattgattgaacagacaagcaaaatggcccagtcacacacactagagcacagcccaaagatgtgcccaaagccaaccttcaaactgtttccgtatagcccttaactgacagtggattttacaaaaacaaaaaaagaagaagaaatgcaaccaggcctgtatgaaattctcaaagcctaaaatatttattatctgaccctttacagaaaaagttactgagccctgcactacaccatagcttagtagctgcatagacacctcccccaaaattttcaaaaatatatcttagttattttatttataaagaattaacaatcaaatgtaaattaaattcaaggcaacattaaaatgcatataaatattaagtttaaagagtgaagaagaaaacaaaatactcttttaagcaacatatgaatgtctgtcacagacttttgaaaatcttcacaatctatgtttacttgcttatagatgcattctgagaactctatctaattattataggatctgtttctttgtatgtgtaccaattctgcaccacacttcactaacatttataggcctgccaaattcagaaatttaatttaccagccttcatatccagggttacctttaggtgagagtatcaccagaaattccagaattctctagcacagtaactacttgtcacatgttaggcaggtcgcaataaattatcagttatatcttgaagatccttcaaaactcttgtgtagttgtgtacagaacacatcaatactgatccagctgatttacattttgtaaatatccctatttgagtcaataaatatgatataactttaaagattaaaaaaacagaaagctcagaagttcctataaaaacactctacactatcttaccactgccgtaccacaatctcttcttttcatacctaagggcttttttacaccatgagcagcaagtgttgccactaatgatgtaccagtttcctttaaatttttttaattataggaggaatatatggtcattatggaacatttcaaaagtagagaaaactattacaacataaaaatcagctgttagtctaccaaccagaacattttgctttcattctttccaacatttttatacacaaatacatacacgtatgtgtataggcatctataaaaaattagaatggcaataaggtattataactagcatattttcttccctaatattatatcatgagcatcatcactgcattaaaaattcttcaagaacataatttcaagttgtataacattcaatcatatagctatatcataattaacttattcttcactactctttgcaagacatgtgtccagacatctttgactctgattattgcttatgatcccccatatgtggaatttccacaccaaaagattcaaacttaaggtcctggatacaaactgccaaacagctctccagatagatcacacaaactgggccaggggcggtggctcatgcctgtaatcccagcaccttgggaggccagagcgggtggatcacttgagcccaggagttccagatcttccctgggcaacatggcaaaatcccatctctacaaaaaatacaaaatgaagccggtatggtgatgcacacctgcagtctcagccactcagcgtctccagttaggctggagatgatcaccccagcccgggaggttgaggctgcagtgagccaaaaccatgccactgcattccagcctcagtgacagagtgagaccctgtctcaaaatagtaataattttttttaaaaagatcacaccaacttagtttgccatcagtgctaatatttttaaggccctctcatactggctttgaaagccttcgcaaggtactcatagagtgcactttcaactattcagtttctctttttttttttttttgaaacagggtctctctttctctcacccaagcagtgatgtaatcatagctcactgaagcctagacctcctgggctcaagcgattctcccacctcagacctcaaactgacccacatcatgcctgattatttaactttttgtagagatgaggtctcactatgttgcccaggctggtctcaaactcttgagcacaagcaatccatccacctcagcctcccaaagtgctacaattacaggtgtgagccaccacacccagccttagttacttgatcagtatttaacctctacaattttgtagggtttctccttttttccatccagacaagtttccacttttaaaagattattttgaatataataatactaagctttttaggcttcacatgcacattctaaagtaatggaatgatttatcaaccttaataaaatattaaacaaataaaagttaatatataattttttctgaattcctactatgatactcaaaaatagtctccaggattctggtaagcttttaaattatatttaatcccaatatttacgatttatcatggtgttctttcctaagaaaaaggaatccatgataatataaataatatagatgatataacccactgtccttcttatttaacagcctacagacacaattgataaaaaaaaaaagccttttaagacaccatcaatgggccaggatttaaagtcttagagtaatgaaaaatagattccatctgactttgtaaattttacatgtatttaatttgaaattaggtattttcaaaagttagatcataactaatctataaatagggtgaccaaaatatctataagttttcactttcttttcctttctgaatatactcttaatgagtgttcagtatttattaataatactaatgataaggaaccataaggcatcctggagaagaaaaatatgctggttcagctgtatttaaaagtaaaactacttataaaaatgtattcaggtctcataattgtggttcagtttttaaggcttgtctccagtttatctaaaatatattaatagaaagctactaccaaatacaactatttcactaatcttccctcactctaactttcttttctgagattatttttcctaaaataattcaaataagcttttgatttaagcacttggtcttaacctgtggcatatggataaaatgtaaaatatgttaacgtatttataaactgctataaagctgttttattaacccgttttcctgaaaatctaaataatttcattcctaaaacaacttttcaaaatatgtggtctctttcggttgttgtatatctgttcaacaaatactcattcagtgcttgctatgactaccattgactgaaagcttcttaagagcaggaaccacggatttatactcccggcatctggcaaagagcttgtcccctaatagatgtttaataaggtcttatagaaatgaactatgtgctaaataacagggataccatggtgagcatgagacagttcttgccttaagaagctcatatttcctttaaagatagaatacagttattcaataacaaccatttactacctgtcttcacttaggcacactttcattttaaagattagaaataccatccaaaggggagattttttgttttaaagtgtttctaaagtaacttacttgctgatttctttatactgggctatctcctcaatataaagaaggtcatgtaaccgtgactgatagttgctcttggtcaatgatttgtctaaaacggactgagtaaatagctggtcagcagagaggggaatttggtatctgataagaaggctcttctccaaatcagtagtttcattaggttcaaaatctataatagtcttagaggaagaatcccaacgtttagctgtggttactagctgctgttttgcatgcatcaggtattcgagatctaaatggaaacaaaaaacacatttataaagaaacagaacattaaaatttttaaataacattaaaattcttaactatattacatatttttgtatgagaattgtatatgctagagctcaaattcttaaaaacaaaacaatgcaaatacccattgactatttcccccatatcaaaaaacaaaacaaaacaaaataacattagtataaatccatgtttaaaaaaaaaactttttatcaggctaggacatactagaaattaacatttttaaaatacagattaacatttagaacttaactcttcagtcaagagaaatttgaatctgcgtgaaaaagatatgataaattcttcataggttttatcagatgataatcactttctcttcctactaccaatacccatcccattatagaaagagaagatcaaaaactgtaaaaggttaaatcttttcttgtgtgataaagcacaatgaaactacagtatctttaagtcaacttactataaacaaaaatcttttcgaaaatattaatgtaaaacactgctaagtccttattaaaatgcagtacaatgccattcaaatgtcatttccaaaaaatccaggttagccttcgttaaattatactgtaagtagggcacaatgtcaaaacaaatgactgttcaagttctgacataccaggggaaaaaaagtagcacaataccagcacaagatgaaatccatagtaacataaactctgagcactgggttggctcactctatatgtagtgcgtattacttttctattgagtgaaacatacatatacctaaaaaagaaaacttaaccaaaagaaaaaaaaaatgtaaccttactgatacattacaccaagactttgacataacataattggaaaaacggtttcacaactcagattaaaattttaggaagaaataattaaaagttagacaaagatcagtctccaaagtacaaattatcctaaactatctttgaaatgacaacataatgcacaattgccatgtcttttttagtgagagatttggcaacatttaaatgttacatatatattataaacatgagcctagtcattcaccaagattaatgtctcaatagtggcaaatagcttatccaaataatcttagtaatttctaacctttgctccttgaaaagccattttcacatgccagttttatttctcaaagggcaacacaaataccattataaccatcaaatgtaaagatggtctgcttattaaaaacttgcactttaaaaatactctggattggggctgcgcacagtagctcccgcctgtaaccccatcacgttgggaggtcaaggcaggaggatcgcttgaggtcaggagttcaagactagattgaacaacatagtgagaccctgtctctaaaaaaataaaataaaaatatacgataaaattaactatcattaaaaaaaatactctggattgatggtctgtttttgcaatagcctcacaagcagaagtttcctaatgtacactaaccacattttcttcctaaatcactttgacagccaggcacggtggctcacgcctataatcctggtactttaggaagctgaagcgggaggatcacatgaggtcaggagttccagaacagcatagccaacatggagaaatcctgtccctactgaaaatacaaaaattgcggggcacaatggctcaaacctgtaatcctagcagtttgggaggctgaggcaggtggattgtctgagctcaggagttcaagaccagcctgagcaacacggtgaaacccagtctctactaaaatacaagaaattagctgggcgtggtggcgggtgcctgtagtcccagctactcgggaggctgaggccggagaatggcgtgaacccggaaggcggagcttgcagtgagcggagatcgcgccactgcactccagcctgggcgacagagtgagactccatctcaaaaaaaaaaaaaaaaaaaaaaaattttagccaggcatgatggcatgcacgtgtaatcccagctacttaggagactgaggcaggagaatcacttgaacccaagaggcagaggatgcagtgagccaagatcgcgccactgcactccagcctggcgacagagccagactctgtctcaaaaaataaataaataaataaatactaaactctacataatagtaaggaatctatttagtatgtagcttttaaaggaggtctaactactctttggtggtggggagattatatttcataattttattttacatttcactttaaaaaaattaattcagactgtgcctagattactattatgttcatatactttaaaaagtcactagttattcctaactgatgtttaagtagctgagacaagaacaaacctaaaatgacagagctttccctggaaaatgctttttgattcacctacctaatatacaaacaaaatgcagaaagcttttctactctgggttaacagtattcaggcttttggggaaaagtggcatgagcaatagcagtatttgtttttctcattatctatatagtaccctgattcccacctggattttatgaaactcttaaatgcttgtatcaaaatatcacacatacttcataaatgtatacaactattatgtatccataaaaattaaaaattaaatgttaagtgtctttagcaggtagcacagtaatttcaaaacaattctccaacaatgctaaattttattccatttactttttttaatgactttaaacacagtgcaggggaaaggaaaactaggggagcaaaaagaatcttgaaaaaaaaatccacatattccagcaacaaaaagcctacaaactactgatctaagtctttaactcggatgtcaaaaatgaactatggccagtgactactactaaggatacggtatgcaaaacccatttctctttccctacttcatctgaatttgagtcaaacttccagctccattcctctcacttgtacaaagaaacttactaaactgatttaatgacccacctaacttacagtgcttaaaggtcacctcataaatagcagaaggatgtgggtcccttatggggacactgggcatgactcctactggggctctttgtcatctccacctacagcacatgcgtacctgctaacacctcagcactcagggcagcctgagccagtgcatccttggcatgcgttttcttcagcctagattaggctaaagtgaaaaacactggaaaattgagaagtggccaggcgcagtggctcatgcctgtaatcccagcattttgggaggccaaggaaggcaggtcacctgaggtcaggagttcaagaccagcctggtcaacatggcgaaaccccatctctactaaaaatacaaaaaaaaatagccgggtatgatagctcgtgcctgtagtcccagctactccagaggctgaggcaggagaatcgcttgaacccaggaggtggaggttgcagtgagccaacactgcaccactgtattctagcctgggtgacaaagcaagactcagtatcaaaaaaaacagaaagatgagaagtgagcaggttaggatcaatattcataaaaccatttaggaatttaactttaacagtgacttattaaccaattcttacaataataaatctcaaagcaaacctgacagaaattacagacctatggaatgtgttaccctgagatgtgctaggcaaaaactataaacagattttaatagaaatccataagttaaagataattagaatacacctaatcttttgaagataacagtcttttgaaggggttccgctatcaaaaatagaattcaaggttgaaataactactctaacacaagatacatttcccaacttcccttggccttctgaccctgagaatagcagtgcttgcatttcaaccacatctttactattctaataaagcatccaaagggtgggtttgtttcgtcttgaagtatatagtatagcagacttgaaaaatacctttaacaggacctggaaggtagataagaagaaaataagcggtggggaaatcgagtgttctaagtacccagcacaagggttgacatgtaagaggcaggtaataaatgggtgttaaatatggaatttattaaaacctgctatatttatctaggacttagagaatgagatgaaatgcttcctaattccaaaatcagataccacactcttccttagaaaatattttggtatgtggctttacaaatcttgactgcccaaattaacaataaaataaaatcccacagtaatcccaaactactgcttcagtgatccatttctatatcctttctttcacccaaactgccacatggaagcaaggtgaatctctctcagcttgcctatgttaactgtccctatttctctctctgaaagaggctaacaaaaagttaaaacagcagagtaagagcattaagaaatacctcatgctttttacatacttctattcagtttcttttattgacaaactatttaagtctatttttctattacttttctgatcatgtaacagtatgtagatatataatatgttcttaacttaccaacaactttggtagttgggaatactttctaagatagactaaattttaatgctaatgttaacatagatagctagactcaaactagagaaataaatgatatcaagtttccatatttaactccaagagttcattttcagcatgttgcttccagatattcaaaacagaattccaaatcaattttgccaaacaaaaattttccattaatcaagttgtggtataaaccataagaatgcagtctgttttctaaacaggggataactcactagcttccttcctttgcagatgcctttgccacatatttttgaaaagcctatccttagtccagaagcttttttagtatatagtgtctttttctgaacccgaatctccccaacaagggaaaaaaaaaactacaaaaagcaaaactaaagtcactcatatttcctaaagagttttcaggattgccaaaatgactagagaaaaaaaatatttgttcatggcctacgaatagaaaaggtctggatgctttaggtacagtgacagtaatatttaaaaaaaaaaagaaacccaaaacctatgtttattttcctccaattcaaatttgaattaactaaagtaggatttttagttcaatacttaacaatgaactagagaaatataaacatttgctatataacttgattttaagtttcaatgagtaacacactaacataactaagttacatgaacatatcagtttgacagacactgagagccaatgattaactgagctacactgtctctaagagggaaataatgcatgctgcatttctaaacttatttgtacatggcattctacaccttcggtgttattattaattttagtggaacataatttagaaaatgctaagctaatagcctagcatggtccaaatttataaacttatgcaagagaaatacggttccagcattcatttaaggacaaaaacttgcttaaaaacaatgaacacccaatcaagtggaagatgcaataaatatttcccactgagaaggagtaatctctaaaaaaaagaacatactggccgggcatggtggctcatgcctataatctcagcactctgggaggctgaggtagaaggatcacttgagcctaggacttcgagaccagcctgagcaacacagagagaccttgtctctacaaaaaaagacttttttaattaacttttttaattagccaggcatggtggtgtgcactgatagtctcaactgcttaggaggctgaggtgggaagatcacttgagcctaggagttcaaggctgcagtgagctataatcacaccactgcactccagcctgggcaacagagcaagactctgtctctaaacaaataaataaataaataaataaataaatagagatatttcccattcaaattccagtttcacagaatcactaagtttccttgtgtatgcaaaaaccaaattatattataatttataatattttcgaaaccatatggaaatatgacagatcccagacctaattgaattcccaattgcatttggccaacttatacctggaatgacacttttctcctaattccaggccaaggaagatccaatgatgaactggctgaggctgaagatcaaattagccaggctgtcagattgtcaccaatttaacaaagcagttatcttgctctcaatgtctctgaatgttgtccacacaagtattccaggaaaagatacaaaataggacactgccattttacatttttattgtctcagaacattttataaaattgtaatttcacataaacaaattgtttgcccataaacatattttctgctgacatggactctcccgtgataatcaaaaacactaactgtaatagtactgagataaaagcaagaaacaaatattacactacttatattctgcttttatttctttacaattctgttaggactctccacataatcacaatgaaacaaaagtagtcacgcaataaaaatttcaagagttaacaaaatggtaagatattcaatgacatcaattttaagggtggggaagttatcaaagagctaaaaattagcataagtcattatgctgatgaccaaaaaaagttagcccaatatcatctagcttgcctaaaacctagatctaagttttcctttccccaactttcaaaatcttacataagaaaatgcattttgtagatttcatactgtttgttatttctcctttgtctttaaacaaatttcactatgtgaaatcattttaatgtttccaaattagtccaagaaaatgcttaagttttttcaattattttctatcacataactacttaaaagtaaaatcttaaaggaaaaaaggcaaagacatcaaactacaaagaagtcactaaaaaaaggatatggtattatgaaaaaagaggaggatatccttgtctatataaatcctctctaccacatctgaatgaaatgtaaaacttaattttcaaactaatatgttagaaatatcagaaaggagattctttgtttcttccagctaccaggctcaaaacatcaatcatcttggaaaactacgctttcaactcctacaatgtgttctcttgccaacatctgcaggcactgtggcctcaagggctctctgctttttaagtcctctgcttgcaccctagtccgagtcctcattttaaaaaacaaaaacaaaataaagaaacaaaaaaaaaacccaactcttctcttttcctactttcttccttttgtgtataagccagaaattatcctaatcaaggctaattataaacataatagctactattaactaaacgtctactatgagcctgatgtcgtacgaggcttcaggttgtcacaatgatctatgacaggtattactagccccattttacagatgtttccccgtgaagcccagagaagttaagtactctgcccaggctcacacaggcaataagtcgaaaatcaggattcaaatcctattctatttgactctgatttttgtcctctgctcttctccaacaagaaaagtaactcgtatctgaggcagaagtagtcaaagtacttttactcttctcaagcctatgaaagtaccctgagctccttttcatcaccaccttttctaattatcatgttttaatactatcgttcttttacattttactgcagacatttaacattttatattattaattaaatattttactaactaataagaattcttgacagcacttacaaacatttctatgggtaaaggagtctgagttataagccactaacctacaagcaaatttctaaaatacaacccacatgtaagccaagaacatcctttacagttatatttgagagtaggaaatgtatgttgttctctctttatgacttaaatctctttatgatttaaaaaggatgctgcttagtggttctcaaggtctggtctctaaaagcaacttactagttcaggggtaggcaaactacaacacgaaagtcaaatgtagccattgtttttgaaaataaagttttattggaacacagtcacacccatttgcttatgcattgtctatggctgctttctcattacgacgcagagctgagtagttgcaacagagatcacctgccctgcaacacctaaaatattaaccgtctggccctctgcagaaagaatttgccaaatactatgctaatatatataagccaaatactttatttttattttatcaactaccatatctatttagctatggaaattaatttattctgattccaaagagtactgaaaagatgacaaaaatacatactacagaataaaaacaagtaaaagggatcaaagtcagtgggaaataagggtaaagtgaagtctgggtaatcttagcacacgtagaagaagatgtcacctaactgttaaatttgggcaccatcgttgtttcaaccttactagcagctaaagtaaagaggaagacagaccaatttcaccttttcactatgtgaaaaaaaataaaattctagcattcgctaatgagaaaaactacttctaggttctcatgaatgggacattatggtacatagtaaaaaacgtcctccacaatatggttagttatagtcaatacaaaagcaagtttcacacagctctgctttttgaagtgtttgttaaataaaaagtttttgttaaatagaatagaacacctataaatccaaccaagagcaaaggaaatgtgggctaacatgtcctttctttgtcctgttggatcttggcataaaatttagatataggcaataaattgacaatgtacaaagtaattccttatgtcatgcttacatgatgaaaccagggacctcttcccaaaaacaaagagcagatttgattaaaggcacccttggcctccttaacactagtggatgcacaaactgatttatgaaggcttattatactcaagacttttcattcagaaacaatgtactaacatcagcaaagttaactagtcaataggacatgaaaataaacattgtaggtatatacacaattaccattaaaatgatattctacccaaactaatattgaaagatattactgtgctaaaaccatcttactgtgaaatgaaactggtagaccaaaacaggtctgatcatctactcatacaagtttggggaacctcaaagttcaagctttacctggtggctctgtgaagaaatcagggcacagtgtgaatcattataagcccattacacagtaaatgagtcaattaagttgggatttttttctttattactattctcttcctatccatggaatatattcaggggccaatacatatctttgaatgttgctttttaacacattgtatcgggggaaaaaagtctaaatattaccttctgtagaagctgcatcaatcattactctttgcatgagtactggttccaatccaaagtcgaaaactatggtttggcgaaaagttccaaatatttctgtgttaaatgctatcccgactttatacacgtaatgatctaatccattttgggccatctttcctcctatccattcttgacagttttctgggacttcttgtgatacctgggtagtactatctccggcagatattgcaatgatactaaaatgaggacgatgagcatcataaagcaatgctacacgatacagcattcttgcaggctacaaggaagttaaaataattcattgagtacaagggggtgaaaaatccaattgtaattgggctcttcaatgaaaatatttccataagggacttttacttccccaagcttctaagatactatagccatttaagaaaaaaatcagaatggttttttaaaatcagttgttaaaattatttatttatgctatatcgctagcctcccttctcttcctgtgacatgttcatttttcactgtggcaaaagctatcaccctatataaccatcaaccttcaaactttccatactcttcacctacagaagtttcatgtagcctcaagtaggaagccttcgtaagagggcagttacctctgaaagcactggattgggttcaaggctgaagctaactgttcttagatttttcatctccagatacagaaagtacagcagaagaaatgccacaaaaaagacaaaaacttttccactgagcatactcacagaaactttttactttgcttcgatcttaaactttgactactataatttaagatgggaagcactgcagaaaatgccccatattaaaaacccattatcacagaatttgtgacttcatcatatcaaatataaaaacaagttgttatggtttaaaaatcttagaactactagaataaacaatttttaagtagttaattacaagccatgaaccccatcctatgtcccaagtttagaagacaatatgtcaaagatctctttaccaaataaataaatatgaaagcaccctaaatatctacaaagatctcatctaaaagtatttttaaaattgtacttttaatgatcaaagtacagaaatatactttagtacaatatagaacctatatataatgtacttagattaaaatattttcaatattctttaacacagagattcaaaggtcaaaaaaacgttcagaaaattaaacacaacttttatgctttaactagcacaaaattcataccttacaagtgagagcaaaggtccatgtctggtgggattttttggtgctgacagtaactgacaggtcaggattgtgctctacctttactccttctatacattcactaagctgaaaacagacagcaatttatgttatgtttttattgctaagggcacaaacaaaatcttttagcatggaaaataaatgtcaacagttaagatgatgatggaactgtttacagaccaaagtattttataccttcattttcagtaattttgacaagaacaaaatatagtaaagctaaaataagagagaaaagaaaattaaccaccaccacaaaaatggcactcaaaaactgcctgaatgaaggtaattaatacagtacaggcaaatctccaaacaagtggtttagttctgctcttcattttaacaaatgggtctactatagctactaaaaacatcattctatcagaatcaagttctttgcaaagaagataaggaaataaaccaaaatagagcacacaataaagtcaagactcaagttcattgtttaagacaaacaaaaaataatgtagcttattttcctcaccactttctcaggagacaatgaattcatccacttttctatcaaggtttccatgtaactgcctgagagctgtttattctcattttgctgtttcaattttatcagccgtgaagcatatcttttctgccattctgctagttcttcctgggaatgtgctgaagtacactgggcaccatacctacagattccttgttctaaaaatctaagtagaataggaaagactgttttatcatatactttgttgaaccatttaaaaataaactcccagcatttgccctctgattcttcaataaaaacaaaacttcatgtgctgaaaggccatatttatcgtactgtcttgtacaaaggagggagaagaggtttagagaacatttacaacagttaaccaaaacatcagctccccatattattcactgactttctctggaattaggggatcctaaggcataggtattcacgtcggccctccaaaagaggcactgaaaagtagcttccttggtcatataaggactcttactagacaattcctcttagtgtaactgggttttgtttttgattttttgttttttgtttttgagacggagtctcactccgttgcccaggctggagtgcagtggcgtaatctcgactcactgcaacctctgcctcctggtttcaagcaattctctgcctcagcctcccgggtagctgggattacaggcgcccgccaccacgcctggctagtttttgtatttttagtagagacggggtttcatcatcttggccaggctggtcttgaactcctgacttggtgatccacccgcctcggcctcccaaagtgctgggattataggcgtgagccaccacgcccagccagagtaggatttttttaagcaatactgacatcaagtggatttgctgctcacacacaggtataccctacttcccaaaatgataaggaccttaaaaaaattttctatatatgggaatttcattctgaaaaaacagttaacatatgactaattaccattttaaggcttttacttttcacctttaaacatagtgattttactcttttctacattactattacctatatttcagtgaaaatatattaacttgcttgaagctttaaataaatttagaatcaaagttttatattacagagtcacaaatttattcaacagtcatgttaaattcaagggaataaattataaatgttcattttaaaggacagagagtcaatgatttctcgacgtttacaactcggaaaattcaactgacaattcagtgaccaaaaacagataaaaataaaatactttgataatttttttttttggagatagtctcgctctgttgcccaggctagagcgcagtggcacgatctcggctcactgcagcctctgcctcccgggttcaagggatgctcctgcctcagccttcagagtagctgggattacaggtgcctgccaccacaatgcccggctagtttttgtatttttagtagagatggggttgcatgttggccaggctggtctcgaactcctgacctcaagtgatccacctgccttggcctcccaaagagctgggattacaggcatgagtcaccatgcccggccctgatcattaactttttttttttttttttgagatggcattaactttttaaaaaagttttaaataccctgcaaaattataggcaaagccagtttttaaataaaaataataaaaacattgataaaagatcttctgagaaaaaatgaaaattaaactagaaatataattaaatggccgggcacagtggctcacgcctgtaatcccagcactttgggaggccaaggcaggcgcatcacctgaggtcgggagttcaagaccagcctgaccaacatgcagaaaccctgtctctactaaaaatagaaaattagccggggtggtggcacatgcctataatcccagctacttgggaggctgaggcaggagaatcgcttgaacccgggaggcggaggttgcagtaagccgagatcatgccattgcactccagcctgggcaacaagagcaaaactctgtctcaaaaataaaaaaaaatacataattaaatgtaaatataatataaaactataaatagcaaaagagagatgttatattacagaccatttttcaattggaaaaaatatggatagtaagaaataagaaatgaaccacagcacaatatgaattttcaaatggttcaccgtatttgaaaaaatgagtatatttaaaacttttcctgatggtacaacaaagtacttgaacttaaaattatactatttattaaattctcttacacttttgaagacacatttaaaatcattttatgtttcttttcaatatgtcttaatgggccaaatctttgtctttctattgcttggctttaaattatttccctaaaaagtgaaagtgttatattcttatctgtacttcaaatcttctcatatttccttttcataggattgtgttctgtctcttctacaacataacaccactaggattttcaatacttacacattagtttcctgactattcaataatcaaaaccatgtagcaaatttccttcgctatcaaaagtaatctaaagaggcggtgagaatttatatctaaaaatcccactagttacaagttcttacaaaaagaaccgaagagtttaccattttaactgtaactttaatcattccttccacattaataaataattattaaattttgaaaggttagcccttcattatgaattattcataaattctacataagaattacatgaagataatatttttcagaaaggttaaaacaatttaacatttctttatctattttatgctctactttttacataaagtattgtcaacttcaatcaccacaacctaagtaaatttcacattaacaaatggccatggccaggtgtggtggctcacatctgtaatcccagcattttgggaggccaaggcaggaggattgcttgagctcaggagttcaaaaccagcctgagcaacatggtgaaaccccatctctacaaaaaaaatacaaaaatcagccaggcttggtggcacacgcctgtagtcccagctacttgggaggctgaggtgagaggatcatttgagcctgggaggcagagattgcggtgagctgtgatcaagccactgcactcccaactgggcaacagaatgagactctgtctcaaaaaaaaaaaaaaaaaaagaaaagaaaaacaaaaggacagaaattaagttcagccataataatacaactggtattataaaagactactgaggccaggcacagtggctcacgcctctaatcccagcactttgggaggccaaagtgggcacatcacaagatcaggagttcaagaccagcctggccaacatagtgaaaccctgtctctactaaacatacaaaaaattagccagtgtggtggcacatgcctgtaatcccagatactcaggaggctgaggcaggagaatcacttaaagccgggaggcagaggttgccgtgagccaagattgtgccactgcattctagcctgggcaatagggcgagactccatctcaaaaaaaataaatagataaaaaataaaagactactgaacagtcttaacaacctgcatttagatcattgctgtttagaattaaaggaagagaactcatcaatatggttttgacttttattacttaatgataatgacctttatggcttctgtttcaaattgaaaataaaccattttactccattagataaggaaaattatctgtcctttcaacaagacatgtcattgtttaaaaacaaaaaaattcacattaccttttacacaaagtatattcctcgctgcttgtgattcccctaggtggtgggcggaaatgccaaccattacaagaccctagggagtaattaggatatagtcttatcatttgaggctagccagtaattctgatattttaatgtgtaagagatactacaatccctccacatacatcatcccatatgatgtaaaaaagaacatgacatacttgcctctaccaaaaagtaatctaccaatcaactacataaaacataggaatcactgaagaggcagtttcccagcagttagttaaaatcaagctggtgactctgactctgtcctagcaactggtggacaggtttccagtgcaatctcttccctaacaacacaaggcgggtggctggcatacttgtcatttcttaggcatgggatgtttgtctatcaggaattccttcagggatgaaaaaaatcattgtatcctggaaggaaagcttacataacaaattccactactgcacagtgagaagaagttccatgttatcacattatcacccatgttccttaagatttgtctgacacgtcactgtagaatataatccttttttaaaattgaaataaagttcaaaaagtttaattctgagataggagctaaaaacacagtatttacttacttgtgaatacaatgagctttgatttgtttggataggagtttccaaataaaccagggaaaataaggataatgagaaaaaaaggctagaactttatagaggttgagcagcaacaagtttcaaggaacttatagccattttctactccctcacaagtcactatgccccccagaaaaggaaaagaaagatattcagccaggttgagtttaaagctgtgcttcatctctatactagctgtgtgactttagggcaactcataaaccttaatgtcagtttcatcacctgtcaaaaagatgcagaaggactctaagtcagtacatgttttgtgaaagccaatgcccatagtacacagcattcagcaggcactcaatgaatgttcttcttttccctttcctctggtgagaggagaggagatcacagagtttcattagggcaggaacaactcagctcacagatcaaaacttccaaaaagtaataactgtactagcttaggacagagagagaagaaaagtcttccctctatagattgttaagaatgatgtttaaatttagtcctacacggaggcaagaaaataaactaaatgacctctgaagttacctcctacctccattactccattattctatgaaaaggtgccagggagaaaattgctttcaactacacctacttcttaaaattaaaatcttatattctctcctacatctccacttatatgtactgtaactcagtaaattttctcccaataattaataaaagcaaagcccttattcacagctaccagaagttacacagcatttggcacttaccctcatctaagtcttccacgtgatatccagagagggcgttactagttgctgtctgcaattttccaaatgaaagaattttttaaacaagaataacgttgatgctgaactaaacttgaacattttcaatattaaaacaaaggtgaagttggaatactcagaaatttttaataacattaatatgttgccaatgatttttgtttttttctacgttaaactataattaaatatggaaaacatatttgtgaggctctcattaaggaagctgatagaggcctcctacatagaaattagctggcagcagaagagaagtccaagtccccagtcttgaacctcacaggctagcaccttccatccatttattcactttactctcctcttcataacacctagaaaatgtctgattacagaggtttcttttcctttttttttttttctttttttttttttttttgggacaaagtcttgctcttttgcccaggctggagtgaagtggcgcaaactcagctcactgcaacctccaccccccgggttcaagtgattctcctgcctcagccttctgagtagctggaattacagatgcccaccaccacgcctgactaatttttatatttttagtagagatggggtttcaccatgttggccaggctggtctccaactcctgacctcaggtgatccgcccgcctcggcctcctaaagtgctagaattataggcgtgagccaccacgcccggctagaggttcctttttcttgcagctaatggcatgctaccactttggagcctgggagcacttactgctaggtaccccactcactctgagatgagcccttctcccacagaggagtccaaggctagggatccattcactctaacatcctcagataaaccaccaatcagcgcatttggctctaactttaccctaagctctacacttccaatttcaacaaagcgccaaccatagcactttttctaaactattctgtagtattttacatgctagatcgttatcagcgatatacacatctgctgtcagcagtctgtaactgcctttctatattcttgcacctctcaaagtatctggcacataataatgggtgctcagtaaatgttggatgagtgggtgggtggataaacagatagatggttggttagttggatggatggatggatggatggatggatggatgggtgcatgggtgggtggatgggaacatgggtgggtggatgggaacatgggtaggtggttgggtgggtgggtggatggataaatggatgattcacctaagcactttaaatgcaatgggcccaaagcaaaattcatcaactttatcctaaagttgatccttcttcagtgctccttatcacaagttaatggattcttcttacccaaagagagccaagctgaaattttcaaagccatcttgaactcctccctcttctatcctgctctgaatattctccaaatcttgtccaaacaggtctagaatgtctctcatctctcttacattctctcctcccactgccactgtcctaggtaaagccctcattaccgcttgtctcatttatccctgaaccaactgacagcttgccaatcttgccttatatcaagtcacctgtgggtctttactaagtgatatggtttggctgtgttcccacccaaatctcatcttgaattgtagctcccataattcccttgtgttgtgggagggacccagtgggagataactgaatcatgggggcaatttcccccatatcgttcttgtggtagtgagtaagtctgataacatctaatggttttataaggggaaacccctttcacttgactctcattcttctcttgtctgccgccatgtgagatgtacctttcaccttctgctgattgtgagccctccccagccacatggaactgtgagtccattaaacctctcttttgtaaattgcccagtctcaagtatgtctttattagcagcgtgaaaacagactaatatacttagctatccctatcctttaaactcagttctcacacttctgcccccctgatttccctgcagagttttcccctttccctgcctgtattttgtgatagcacttactgactgcaggctgccctgtgtgcacattagctgtgtgcatctctgactgacctgccagattgcttttcatggacatctcagctttccagagccttgaacagcacaggtgctcagtaaatgttaaactgaatcagaaggagtaaacagtatcccaagatgaaatctggaatatcttgtaccatagaaagaacgtcagaatgctaacgggtcataactgaaacaatactatcactataatttatatgtggttgattaaattgtactttttaggttgggcttgaactaaactctgtaatactgtttccacaggaaaatgccttctgattatcagtaaagcacttactaaggagtttttaaaaagcaagccattctttttgtaaaacgaagggctgaatataagaatacacagattaacaaatcaggagtaattattcatattattagcattctacgctgcaaaaaaaattaaaaaaaagccattaaaagatctctttaaattcttcaagcaaggtctatgtgccactgtcacaaactagcccttcaaatgattctatttacataacatatataaatagataggctaaaaattaactgcaagtaggaaaattttaaagtatctcctttttaaaacctatcaaaataaatttatcaaatgtgcaagaaaaataatgggaataaaaatgtttgataaacattattaaaatgttttggtcataaaataaagcctaaaacacttataaatgttggagagaacaccacacagtgcatttcagcagtcagcacctgtaagaatcagtgacgacccgcacgggcctgtgctgacactgagctctaggtctcctggggatctggggagcagcacatgctcagcagagaactggtaaagtaaggcactcagcctggctaagtatttagcagtcctggcttttaggttccaaagtgttgtgtttgttttttaaacactctttttatgcacttatactccaaaacaaaaaggcaacagtttatcatcattagtctttaccgacaccttcaggaaaaatggccaaagattacactgctagaactataaattcagaatcaaatctattaatcagatattttaaatgttactaaagaatatttactaaagaatacttgtttttgttttcataaatcagtcttgagttccaggtctttattctcatccattagcatttacaagttaaataccagcttagcccaatttttaaataacaaattgttgccatttttaaatgtgtcatgtgcaataataaataagggtagcactgtttgttagcttttcctaaacggttatcttttaataatatcaattcactaaccaaaaagactactactctagttagatagaaaaaaattacaaaaacttaagtcacttcttccaaaagtatagtcacaaaataagagtcaagtgatatatgtggccttacatgcaacaggattataaacattaaaaataaaataaattgcatgtgattatcagatgtaaagttggtaattcaattaaggcaataaaagaagaacaaagccaaaaatcttaacaaaatgaaaggtcattttatgctgtcattttaaaagtctaaaacatctacaactgccttctgttacttcttagaaattaaaacggctacatatacactattaggttggtgcaaaagtaattgcgattttgccattacttttttttttttttttttttgagacagagtctcactctgtcgcccaggctggaatacagtggtgcaatctcagctcactgcaacttccgcctcctgggttcaagccattctcctgtctcagcctcctgagtagctgggattacaggctcctgccaccatgcctgactaatttttgtatttttagtagacacagggtttcaacatattggtcaggctggtctcaaactcccgacctcaggtgatctgcccgccttggcctcccaaagtgctgggattataggcgtgaagcaccgcaccgggactgttttgccattactttcaaaggcaaaaaccccaattacttttgtaccaacctaatacctatatatacacatggctttgaagttagtgagagcttactgattctcggttgattcacaatcaggcaacataagacaaagaaaatgaaatttagaagaaaaagcctaatagtagcaaaacagttattttttccagcttgtataatccatggtgaccaccttctttgctgttttttggtatgaactgggatacattactacatttggaatggaaaggaacccacaggagttcaaagttgacaccagggtctctgcacatcccctctgtctgtctgaagcgccctccatctcactctccgtgagacaagcaccttctcaactctcagctcttggtttaactgtctcagtccttggccaccaaatccagtgatttttccagcagaagagttcattcttttccctcatatcacctacctctctgtgaattacacttacagttgttcaatttatttacttgttgtctatctccttcctaaaactttaacctccaagaggacaagaaccatgttcagtgctgtatccccagcaacaagcatagtacctagcacataggcaatttttgaataaataagccaattaatcactgtacatgggcttttatgacaaaagctgacaaaatggctattttttaaataggacatctaaaaataaaaatacttttatatgcctatatgaagaagaaaaatttgagacttacaaacctcagggccttttacatgccactgttgtccctgaccttccatgtgtcctccaagtccttcactggagtacttttttgttcactatttatcctcatacacattatttccatctcctaaacacattccttaaagacagtccttaaatcacagacttccatcaggtgctttaaaaaagacaaaaagaaggcctggtgtggtagctcatgcctgtaatcccagcactttgggaggcagaggcagacggatcacttgagcccaggagaccagcctgggcaacatggcaaaactccatctctaccaaaaattaaaaataaaaaaattagccagacggtggagtgtgcctgtagttccagctactcaggaggctgaggtgggaggatcacctgagccaagggaggtcgaggttgcagtgagctgtgatcacaccactgcactccaacctgggtaacagagcgagaccctgtctcaaataaacaaataataaataaataaggcttgaggatatctcatttttaatgatagcatttcattttctagtagccagaagtagttaaaaactaaaatttcccaatcatcttcccatttgttgtccagagacagctaataagataccagttctgtccactagggacagaagataagccctggcacacagaggagacatgtggagaagcagcattcccacgatgggactgtgggttatgggggttacgagggaaggctggcagtcccactgccccaccttcacagcctcgccttctggctgatgccacaatggttttccaaattttaatacataatgcttactagacagattgagtcaaactcttccaaacggatccactgaaatggccttacctctgtttctgagagaagtgtttttagtcttgtcaaatcctttgttaccatcccattctgaaagggtgaataaaaaagagaagaaccaattagtatattaattctttactatggcaacttagctcaattcctctgttgtttctgagtttatttgtaaaaaacaatgttatcctcatccctcatcactactaccattaacgatgacaataaagcaacacatctatgaggaaaatttaaaaggttaacaggaaaaactatacagaatgccttttctggtaagtaaaaccactgtattcaccttacattaattaaaattaactcaagaaaatattaacaacaggtaccaccacagaacaagacagcataaatgaaaaggaaaacaacctattgctgtttttaacccttttcctaagattaataagtttgtatgtacaaaatggtgaacccagccatgattcaggaagattcatataagctgatcacaccactttaaaaatggctctttaataaaaggaaaatatcactcttctgaaatctaaatttcatttgagatttaaaagcaaattactctttactcgttttaaatttaaaaacaacaggtaaaactgtaatatacttaacttatacagaaaagccctttaatgataatcttaataacaaagaagagatatattcctttattatctacttagaactaaatagctatataatttttctatgctaatacattttagcttttaagttcatttatgaatctggtgaaatcaaaagacactgctaaacttaaacataattaaacaattcactgcacaataattccttagaaaataactatcccgagatgggccaatacattacactcaacaatataccaagtacttccctaacttctttttttttaaccaaatataattatttaatatttggagtaaaagcacaaatctgccccataattttatcatctatatcaattcagaagaataggaaagatacagggaattcacacagcagagcaaagtatacatatactttcttgctttcactgtgtttcattatgattcttgaaaattatcaacaaatttcttaagttacgaactggtttaaaaaaaaaaaggttatagctcttttcttccactttctatagattatcaaatccaaagtttcaaaaagtagcctttcaattatctcaaccaaaaaaagccaaaaaattaaatatacttctgagcacagtggcacatgcctattgccctagctactgaggaggttgaaacaggatcacttgagcccaagagttcaaagctgtagcgcactatgataaccccctgtgaatagccactgcactccagcctcagcaattcagcaagactccgtaacttaaaaaaatcaaatgctatatttacaaaattgattgtaaagtctgaatagagttagctagttccatcagagtggttatggatattacttacacacatacaaacagaaacagaagcacttattagtttagatagatttaaacattttatgaaataaattgttgaatttaagaaccctatgagatcatatgtccacatcagcattttaaaactcaggctctgttaaatcatatcttcaaagaaaatcacttagttaacctaaattattttaaagtatctacaattcttatatataatcacaaactacaagaattaataattaaatatcattttggtctcgaaaaaagagcaggggctcacacctataatcccagcactttgggaggccaaggagggaggattttttgagcccaggagttcaagaccagcctgggcaacataatgagacctcgtctctacaaaaagtcaaaaattagcagggatggtagtgcgcatctgtagtcccagctactcaggaggctgaggcaggaggatcgcttgagcccaggaggttgaagctgcagtgtgcagtgatcacaccactttactcagcctagacaacagactgacaccttgtctcaaaaaaaagaaaaaaacaaaaaaagaaaagaaagaaaagaaaaatgggtactatatctcaggatactcatgaattttgctttctaatagaggaagaactaaaagaaaaaaagatacacttttttttccccacaatatacctaaggaatcaaataaaaatttgttttcaggcatacaaaattagagcttatcaacataccagggactctcctgtgagtgacttggcaagaatggtggatacaggttggagcttccctttcagctgcatgcagcaaagcactgcccgaaaggcatcttctcccttggccagtccttctcccagcactgccatgaaagaacagccatcattaaccatatgacatttaatgcacatttttcttgattatagtattaacacactatcacaagcgtggctttttatatgctaaaagagtaacttcaaatactctagagggaagcagtggtgtttctgttctgtccaaaacaggcatataagaacaagaaaaaacatgcggcaataaacataccgaacttacaaccagttgagatcaaaatcacaggaagaatcaatccttaagctctcgagggaaaaatactgttcaacctacgaattctgggtaaatgagggcttttaaattgcagacttagctgaataaagttctcatgttttttacagtgacataagactgggtgccattaaaatgagtaagaacagaaactacaaatctcacctagatattcctaagcaattaagaattagtctttatcaaatccaacaagatttactaagaatccaattgcccagtggccacagaaaatgctacccaaattgtttgcaagggtttgcagatttaatctaatacaatcatgaggatcatgtttctaacaaaacagaatatactcatttttatgccatgtcatttgagatgatttctcacagcaactgctaatggttcaattagtagagcaatctatatcctctgcattgctaagtccaaggttctattattagtttgtacatactttagcttcctttgcaataatttgctaaaatattttagaaattatttttaaaattatttccaaggaaatgtttctttttagtataacataccatatatataaagtccactggatctgttcatatttttgttatgaatatatcttctcctattattacacaaacattataaaactaataaaattctacataagagttcatcataatctcactactcaacgaagttttcacttactcattttctcctccaattctgatcaatgttcacaacatttttacaatgattgtaactgatgccaacatgacagtttgtattcttttttgccctcagcacattcagtattttccatgtgatcagagtgcttatatttatcttattattggctatataatgttctaccaagtagatacatcaacttatttaacccttcccttataagataataattccaattattaactattaaaaataatgccataataaaaatctttacatataccttttattgaatttactaaattgaaagttgcagtctctctgtatttgacagggttttattcaattatttttagtttggacgaatctattgtttcaatccatccatattacagatcactcatctattcaacagtcactagataattctgttatctagtgaaactccaataaggagttatcaagtgaaaaactccaataaggtatcattaagaatgtcttgagtgtcttataaagttccaaggtaagtattcatctccctcagatcttactattcctaaaactcttcaaatctgaccttgggcaagttacttatctctctgaccctcagtgtggccatctgtaaaacagaaacacgtataaatttgccattaaagattaaatgaaacaatacaagtaaaatgctctcgccaggcatggtggctcatgcctgtaatcccagcattttgggaggccgaggcgggcagatcacctgaggtcaggagttcaagacaagcctggccaacatggtgaaaccccgtctctactaaaaatacaaaaattagcgggcatggtggcaggcacctgtaatcccagctactcgggaggctgaggcaggagaaccgcttgaacccaggagacaaaggttgcagtgagccaagatcgtaccactgcactccagcctgggggacaagagcgaaactgtctcaaaaaaaaaaaaaaattgctctgaagaaaaatgacactcctactaaggtatggattagttacatcgctaagcctatttcctcccctatcaaacggaggtgacagtagctacttcataaggttgtggtaaagattaattatgctaattagaaaagtaactagcagtctcctgcataagtaagaattccctacatattaccttccccttctaaaaattttacagcagtactgagcactgctgaggaaatatcttagttcatttttagtaactgggatattaagaaactagttgtcaagagctgaaaaatgtttgcaggaatgaaaaagtctaagagtatttcaacttcatatgatgatgtcatacttaaagagtattaaatcacataacattttacaaacaggtttcatagatctttggttttgtatgaggtatttgctgaatttcattttgcaagtttcttccactacattgctgtatgaatatcttaatatttgtcaaatttatgtttcccttttttccatctctttttcagacaagaagcagtactgacatactttcttcctgttccccttaaatgaaattcaatttatgtatgggaggatcccatataaaaaactatggcatagaaatagtcaataactatagataaaaacctctcctgctactgtatcgtataacaaaattaaattgcaatgctgccaatctagttccttattaccttgaaaaagcttgggggaaaaaaagtatggcctactgtattattaaacttgtctcggctataaaaactgaacttgccaaaagacatgacattaataatacaatcttgaacaattataaaaaagttacagctccttgcagataaattctcttcccatcaactatgtgtgagagtgtactgtgcgcacacaactgttctcaaactgaattgttcctttctgttcactaggagttacaaaggaggacttctgtcagctcgctgtgtatcttttttgtgatattttctaacacttgaaatatgtcttacttagaatgttttggattagaaactgagtagacttaaaggagtaatattcattcaactgttttagcaaaatacatctttgctggggttccatagcctctggctatcacaaggcaaggattaacaattaaaatgcaattccctttgcttgtaaagaattacctaatataaggaaagtaatcttaaaacaagcttatagtaaatgttgagtacatattctctactgttttcagtaatatgaccatattaggactttttttttttttttttaagacggagtttcactcttgttgcccaggctggagtggaatggcgcgatcttggctcaccacaacctctgccgcccaggttcaggcaattctcctgcctccagcctcccgagtagctgggattacaggcatgcgccaccatactcggctaattttgtatttttagtagagacgggctttctccatgttggtcaggctggtcttgaactcccgacctcaggtgatccacccgcctcagcctcccaaagagctgggattacaggcgtgagccactatgccgggtttttttgttttttgtttttttgggttttttttgagacagagtttcgctcttgttgcccaggctggagtgcagtggtatgatatcagcggactgcaacctctgcctcccaggttcaagcgactatcctacctcagcctcccaagtagctgggattacaggcatgcgccaccacccatggttaattttgtatttttagtagagacggcggttctccatgttggtcaggttggtctcgaactcctgacctcaagtgatccgcccgcctctgcctcccaaagtgctgggattacaggcatgagccaccacgcccggcctttttttttttttttttttttttttttgagatggagtctcgctttgttgcccaggctggagtgcagtggcatgattaggctcactgcaaccaccgcctcctcagttcaagcgactctcctgcctcagcctcaccagtagctggtattacatgcacgtgctaccacacctggctgatttttgcatttttagtagagacaggtcttcaccatgttggctaggctggtctcgaactcctgacctcaggtgatccactcacctcagtctccccaagagctgggattacaggtgtgagccactacacccagcctaggttatttcttttatcaaatccttagttacttctgaagtgttttattaaagagcttagcctaatgaaggtattttttccaaaaactttcctaaaaatttttttcattaccatacaaactaaatcctttagtcagtaatgatataaaatcactcactgcttagatataatcatgctctcagaactaacaattcagaaactgaatttaaaatgaaaataaaggccgagcctataatcccagcactttgggagcctgaggcaggtggatcacctgagtccaggagttcgagaccagcctggccaacatggcaaaaccccatctctactaaaaatacaaaaattagccaggcatggcggcgcatacccataatactagcttcttgggaggctgactgcttgtacccaggaggctgaagttgcagtgagctgagatcactccactgcactccagtctgggcgacagagcaagaccctgtctcaaaacaaaaacaaaaaacagcatggatggatctcaagaggaccatggtgagtggaaaaaagccatctgaaaaggtcatatgctatatgattccatttctataacactctcaaagtggcaaaattagggagatgaagaacagattagtggttgccaagggttagaaaaggtagtaaggaagggtggttgagtgtgactctaaaggaatagtacatttcctgagaaagaaacaacaaaaaaagaagtttttcaaaaaaaattgtaaaaaaaaattgtaaaaggtaggaggcagcacaagggagatcttcacgatgatggagcagttctgtatcttaattgtattcgtggttaaatcagtctacacatgatcaaaatgacacagaatacacacattccttgtactaatgttaatttccttgttttgatatggtgccagagttatgtaagacgtaataactgggggaaagtaggtgaagggtacgtgggacctctctgtattatctttgccacttcctgttaacctataattatttcagaataaagagtttaaaataaatacataaagcttatatatatataaattttttaaaaaatagtttgtaactggatctaacaatgaattaagaaatgttgttaaggctgggtgcagcggttcacatatgtaatcccaacactttgggaggccaaggtaggaggattgcttgaacccagtagttcaagaccagcctgggcaacatggcaagacaccatttctacaaaacagaaaacaaaacaaaaaaacagaaaaaaattagccggttgtggtggcatgtgcctatagtcccagctacttgggaggctggggtgggaggatcacctgagccccagaaggtcatcaaagctgaggtgagctgtgatcacaccatggcactccagcctggatgacagagtgaaactctgtctcaaaaaaaaagaaaagaaaaaagaaaagagaagagaagagaaaagaagagaggcaggaaggcaaaaaggaaggaaggaaggaaggaagggaggaagggagggagggagggagggagggaaggaaggaaagaaggtaggttggttgttgaactgcgtctctattttaaaagcctggggaattaaaaaaaaaaaaaaacaacactggcaaggagcttaaatactgaaattcttgtctccaccacactaatattataattattttagtgatcctgaggcacaatctttttcatttctagaataatacagttctttttgtgcctgttttccaagtttgttaggctaaaggagataaaaacatctgcaaaatgctgaagtaggccggacgcggtggctcacgcctgtaatcccaacactttgggaggccgaggtgggtggatcacctgaggtcaggagttcaagaccagcctgaccagcatggtgaaaccccgtcactactaaaaatacaaaaattagccgggaatggtggtgggcgcctgtaatcccaactacttgggaagctgaggcaggagaatcgcttgaacccagaaggcagaggttgcagtgagctaagatcacaccattgtattccagcctaggcaacagagcgagactctgtctcaaaaacaaaacaaaacaaaacaaagctgaagtatacacaagtagtagttgaggataaagcaaagcaacatgccctttcagatcagaaagacttcagttcaaaaccacacttccactctggactggctctgtgctcttaagcaagtaacttaatctcacaaagtctgtttgctcatctgtaaaactgcaatgataatacaatttgactaaataacatatttcagagggcccaaccctgtgacaattttaaataaatactgttaactcattcactaaatattttttccaaaaaaatttttaactaccatagaaactatttaatcaaaactcttctgagggccaggtgcagtagctcacacctgtaatctcaacactttgggaggatgaggcaagaggatcacctgaagccaggatcactcaagaccagcctgggcaacaaagcaaaaccccatctctacaaaaaatacaaaacaaaaattaatcaactatgctggcgcacactttgttgtcccagctactggggaggctgaagcaggaggatcacttgagctcaggatttcaaggctgtagtgagctataatcacgccactctacttccagtctgggtgacaccatgacatgccatctccaaattaacaaacaaattcttctcagaagaaaggtagttacagatatcacttcctcccccagagagagtacagaagtttcaaccaatcgcctatcaatttgccttttctaaaagtcagcctctttaacaggggttgctgattactgaatcatttacttcacaggccaagtctcacaacaacaaacatcagtagatgacccaagcccctttgtttgcaatgatgacttcttacattaacaaaactcttagctaggctttacaaatcttacagcctcataaaaaattttcattgatgtttatgatggttaagtttaacctacatattacaagtggtacaatactcttagttgataagattacgttcttttgattttactttctccatttacctcattcatttttttagtgtaaaaaaatggccgggcacagtgactcacacctgtaatcctagcaccttgggaggccaaggcaggcagatcacaaggtcaagagatggagaccatcctggccaacatggtgaaaccctgtctctactaaaaatacaaaaattagctgggcgtggtggcgcatgcctgtagtcccagctacttgggaggctgaggcaggagaatcgcttgaacccaggaggcagaggttgcagtgagctgtgatcacgccactgcattctagcccagcaacagaacaagactcaaaaaaaaaagtaagtttcctatataatgactattcgaaaggcaaaaatagaaccattatttcatcaaagtttttgtgttatgccaaatacaactgatgttcagacaatgaaaagtgacttaactacctcacttatccattggtcgctggcttggcaatcttcactatccagaatacaacaatgaacttggaactgaaacccaggaacttacaaaggtgcccttgagtcctcactcagagtatgtttactcttattgaagcagaattccaactttaaaattttataacctttaatcagttcctggtttaaacaaatcagctatttaaaaaaaaaactttggggacagaaaaacaggtaaatttgattatggactggactttagataggttagggaattattagagaattatatcaattctattatgctaataataatattgtggttatgcagtcttgatcttattttttagagaggcatactgaagtatttagggataaatgtcatgatgtctttaattattcttaaatatttcagaaaaaatgaagtaaatatggcaaaacattagttgttcaaccaaagttttgagaatatgaatgtttattatatcatttactctactttcctgtgtgtcttacatttttcatattaaaaaagaaataatgggctgggcacggtggttcacgcctataatcccagcactttgggaggccaaggcaggtggaccacttgaggtcaggagtttgagaccagcctggccaacatggtgaaaccccttctctactaaaaatacaaaaattagctgggcgtggtagcaggcgcctgtaatcccagttactcagggggctgagacaggagaattgcttgagcccgtaaggcagaggttgcagtgagccaagattacgccactgcactccagcctgagcgacagaacaaaactgtctcaaaaaaagaagaaaaggggaagggaagggggaaggtaagggaagggaaagaaaagactgttttttaattccatgatgaagactgctggtctgatttcgtaacccacagtaggtcagaagctgcaagtggagaggagaggagctgcaatgaggcatgttgagagttgcaaggaatgcaaattaatagcctgacagtaagagaacagacatcaagactatgctgtaaggccaaggcgggcagatcacctgagatcaggagttcaagaccagcctggccaacatggtgaaacctcatctctacaaaaatataaaaattagctgggcatgatggcaggtgcctgcaatcccagctactggggaggcaggagaattgcttgaacccaggaggcacaggttgcagtgagccgagatcgcaccactgcactccaacctgggcgacagggagagacaccatctcaaaaaaaaaaaaaaaaaaaaaggctacactgtatataaaatgcaaacataagaagtccacggtctggagtgcttaaactatgagctatccatggctatccctggaagcatcttagcattacgaaactataattaacagagactgaggttcacatgttttttattactgtctaaccatagtacttcatcttatacaaaaataatgttactaaaagttgaaaagaaaaaaattacatgtaacagcagaactctacaactactaatatacatgtataatcttggccaatatttccaaatgtctatttcaaataaacaactctggatatactgcttttggatttatttaaaaaatgaccatttttcaagctcttacttatcacataaaggggaacaaggaatgtgtagaatgtaattaatgaactccttccttattggaaggtaacctatttttctcttttacacacagcactgcaatgaacaccactctgcatacaattttttctctcttttggattactgacttaggatagtatcccagaaatgagattagtgggtcaaagggtatgaatatattaccaagctgcattccattccatactccaccaataccacaaaagtatactcatttcatgacaactttatcttaggcatcggttaaacttatattttagtgattcaaaagttgtgaaatagcacctaattttaaaatgctaagtaaaacaattaacagaataatgcaacatttgtccatatgctccttcagcatttacttttgtatgacttttcctaagtcactgaactttctaagacttttgtttgtacatctccaaaaaaacaagactgcatcaatttcactagcactcagggcaatgaaaactgaagaaaaaggaactatttctcacacatgagattggcaaaatttcaacactgacaggtttcagtgacagattacagagactgggcagtctcgtatattgctgtgggtgtgtgcatctgaaactaatctgacagtgtctattaaaattataggccgggcgcagtggctcacgtctgtaatcccggcactttgggacgccgaggcaggcaggtcacgaggtcaagagatccagaccatcctggccaacatggtgaaaccctgtctctactaaaaatacaaaaattagccgggcatgttggcgcatgcctgcagtcccagctactcaggaggctgaggcaggagaatcacttgaacctgggagacggaggtcacagtgacccgagatcacgccactgcactccagcctgatgacagagcgagactccatctcaaaaaaaataaataaaataaaattgtaagtgtacatactccttaacccagaaatccaacttttaagactatcctataaaaaaaagggcaacaataagaaagaacatatgtttattacaggatggtttataatgacaaaccagaaaactagaaccacctaaatgcccatcaatacgggaatggttgaataaatagcagcacatccacgccatggaaaattaagcaggaattggagccagtgtattaatttagaacaatattcatggtatactgatatgtaagaaagcaaggtgctaggtgatgatcacattatgactttttaatttttaaaggaaaaactctacgtattataagcacttatgtttgtcactgtaaaggcacagaagacctttctcatacagcaaactaataacaataacttcttcagatgggggaaggataaatttttcctctatattatttgacttattactgtttgctcattgtaattttaaaattcccatagatagcagggatttttttaaaagaaaattctactagatatctcttaatttctagttaactctcaaagcacacaattctatgaagtgaggtgaacaaaggtcacagaatctttaatgaatggttaaattaatatttcttttttttttttttttttttttttgagacagagtctcactctgtcacccaggctggagtgcagtagcacattcttggctcactgcagcctctgcctctcaggttcaaatgatttgcctgcctcagcctcccgagtagctgggattacaggcgtgcaccaccatgcctggctaatttctgtatttttagtagagatggggtttcaccatattggccaggctggtttcgaactcctgacctcaagtgatccacccacctcggcctccccaagtgctgggattacaggcgtgagccaccacgcccggcctaatactttttaaaatgttaacacaaaggagtaagcagggaaaaaaaaaaaattaactcatgttaaatacctcagcaccactacccccaaattctggatgaacaaaacactgtattattcaaaccactgagctctgcaaacaattccaccaaacgtgtgtgagaatgtacagtgaactcttctcccactcactcctagattcattctagtaaacagcaacaaccacaaagaaaaggattcctatcagtactcgaagagcaagaatcttattaatctcaatttccagcctgaaacaggagaccaggtgcggtggctcatgcctgtaatcccagcactttgggaggccaaggcaggtggatcccttgagcccaggagtaagagaccagtctgagcaacatggtaaaaccatctctacaaaaaataaaaacatcagctgggtgtggtggcacacatctgtaatcccagctacttgcaaggctgaggcaggaggactgcttgagcctggaaggtagaggctgcagtgagctgtgatcaccccaccccactccagcccaggagacagagcaagactctgtctcagagaggggaaaaaaaaaacacaggaaaaattactaaagagcattctagctagtctcctctctaagaaagatcttctgatcaagaaggaaagacattttaggagggacaggcccatcctttcaatttatctagctaagcttaacattttattcaatgtgagttatgtttcttaaactttggcccttgtgactggagctattcaaactttttttttttttttttgagacgtagtctcactctgtcgcccaagctggagtgcagtgctgtgatatcggctcactgcaacctccgcctcccgggttcaagcaattctcctgccccagcctcccaggtagctgggactacaggcatgcgccgccacgcccagctaatttttgtagttttagtagagatggggtttcaccatattggccaggctggtctcaaactccagatcttgtgatctgcccgcctcagcctcccaaagtgctgggattacaggtgtgagccaccacacccggcctcacacaaacttcaaaaggacacatcatcaatgttcccaggggagtgacaagaacttaaacattcatgagtaagagcaatgttcacaggtatgcccagctcagtgggaatgtcatcatccaaatcagtcactagccaccacagtaaggtgggcttttcaaacattatcatcatttttgaaattagccaaaaaaaaaaatcaaaccttaaacattgttcaattcaataattcgagtctcatttttaaacataccatgtctacaatcttcatcagcttgcacataatttttctgcaaaacaaaaatacaagataaaattaagtatttcaagagctgcttttaacagagatgttgtcaaagggaaacttggctttgtttcaaagtttaatcattaatgttgtaaacttactattcacagagcaaagctaacacatgtgccctctgaggattacagggcactctacaaataaacgtcacagtatacttcctagtccatggacccccactcctacttctcaccttctctaaccctaactcatcagcacctccctccccgccaaaagctttactgagaaaactgaagccacaagaagagaattttcatagactgtcaccaccacgtctccccacttcccagcatacactctgtcttccttctacctgttaacagacatactaccatgctcctttctaaagtcaacctacgcctgtgcagatcaactcagccgcctacgcaggtatggcactccagcaagcctcctcgacttgtcctacatcattaattttttgcttttgattggttcatttctatacagaaatacagttatttctcccatctaaaaaaatatttcccttgactttatctctcccactagctaccattcctttttctttttccttttcctttctcttttttttctttagtgtctcttcatggcaaaactcctcaagagttgtctatgttgatgtatttcaattccttcccccaattctctcctaagccctctttttaagcagactttcacccactactccaaggaagccactctcaagagatcaccagtgacctccactgcatccatgtggacccacacgattcacatgtgcccactcagacacattctcatggctttcttggcagctgctgacactactcctcatttcctcacttggacacacttccttccttcacgcggctaccaggactccttcctctcacactttcccctttcctcagggttgctctttaggttgctttgctggttgttgctctgctccccaacctcttgacactgcagcagcccaagactcggccctcagtcctcgcctcttctctatgatgctcattttcccttggtgattctacgctggctcaagacatcatatagcacttctatcccacagtcttcaatgaatctctctcccaaattccatacgtgcatatctgactgcttactcagcatcttcagctgggtatctgaatgacatctcaaactcagtacgtccaaaactgaactcccaccttcccccacaaaacctcctccccagctgtagccttctaacctcagttgaaggaaacatcattcttccaattgctcagacaaaaagtatcgaggtaagtaactgcgactgctccccctcattccctgcattcaatacattaggaaacctgattgcttctattttcaatgtataaaccaaaacctagttacttctcactatctccactgctaccattttgatctgagccactctggcctggattattctaatagtctccaatctagtctccttgcatcaacgcttatccctttacagtttattctcagcacaaaagtcaaacaatttctgttaaattagatcacaccactcctctgcccaaagccctgcaatagctccccaactcacagagaataaaaaccaaagtctttatcacgagccagcaggccccacaggctttggtcctcccacctctccaccgcgtgcactctactctggccacactaactcctagctgctactcaagcacagcaggcatgcttctgctgctgggtctgtttccattgcctgcaatgctcttcctccagttttacacatggctcacccccttgcctctggttatcaccttctcaatgaggcctgccttgaccactctatttaaaattgtaaccacatctctaaccccaatattcccaatctcccctgccctgttctccttttttcatgcggttactaccttttaacaatctatggtggggttttttttttggtttttgttttttgttgttttttttttttttaagacggagtctcggagtctcgccctgttgcccaggctggagggcagtggtgcaacctcggctccctgcaacctctgcctcctgggttcaagcgatcctcctggctcagcctcctgagtagctgggattataggcacgcgctaccacgcctggctaatttttgtatttttagtagagacagggtttcaccatgttggttaggccaactcaaactcctgacctcatgatccacctggcttggcctcccaaagtgctgggattacaggtatgagccaccacgcccagccggtgtttattttttataatgcttattgtttattttctgttcccctactagaaaaagtatcataaagaagagacttttctttctctttcatcaatatatataacaagaacctagaacagtgtctagtacacagtacatactcaataaatacttgttgagtgagtgcataatccaaaatgccctaaagtagaacagttttcaaggttcaaaaacgtagttaccttgccatcaaatatattcagcaatcaccagccacttcactcacatctctttggcccagaattagctatttgtatcgtcacccctcaatgaaaaaggccattttacatagttcagcattggcttattgacagtgtttactcaccagttgcaaaaatgaggcaattctgtagagaagactctcgattttgatgcgttctatttccaatggacaaggccctgtgaagtctgccatggagtactggccaagagaaagaagggcctctgtgcagtgcttgagggccatttcatagtcctgcctcttaagtgattcacatgcttgttcacatgacttttcagctcttctgtcttccatgactcagggacaaaaatcctacagacagggagaaagaacaagagaaggttttttaaacttattaattataaattctagccccattcctatctcagctggcttaattatctatctgaatactctcagctagccttttgatcaaggtcacagctaagcagcagctattgatgctacaaaatctatacttctctttgatattttatgaagtctttactaagattcaagcaaaatgtcaatcataagccaggatcataccaacaatataacaaatttataaatgaggcaaatttagaaatgaaacatgactgtgaataccgcaaagtatacaacaaaccataaaggatcccctttcttaaccaaagggacagaaacgtttcatatccaaatctccaaatttcagtttcctaatttcagtctcacagttctgtgaccatgattgcaaaaaaccaaaatctataccatgcaggattatttcccaccaattaaaaaactggttggaactgtatgaactgtccattaattcaattcaacaaacatttctcgagggccaggccctgtgctagcagcaatgaatgcaaagacagggcatgtcatctctgctttcaagaaactcagattctagcaagacaggcaaagcacaaatgaacaattacaaaaaagacttattccatctgcctaaaggcatgagctgattgcaaaaggtgaacaggagttcaccatacagatgacagggagagcaaatgtgagcttttcagagagacgagttcaagtgaaatcaccaaggggagaaaatacacagcctaaactcaaggtacatcagaggagtaagagaagctatgaatgacctcaaatgccacaacaagaagcaagggttttattccacaggcaatggaacacgatgaaattttttaaatacggaaggaatctatcaaacataagtcctaccagttctataaagaactggttagaaatagaagaaatcacagcttgccacaggggaagaaatggcaaacattgccattagtaagagatcactaaaatagtccaagtaagaaatagcaggagtttacacgttgtttctccctagctataacactcatggcaggggtggaaaacttggacacagaagaccgacatcctttgacctgacattcacaatactgctccaaagagtcactcttgctgaccatctctgtcaaacttacagattgctttccgtgcctgcatccaccttctctctctcctgctcctccctaccttccaccttaaccgctggccttacggtacttctttgtcccttccgcctgcctccagcctacatatatgttctctgccagccttctcggcttttataatgacacatgggccctgccctctcctcgctgtgctgtaaccatctgctgccaataaactgcagtgcaagatgaggggagaaaagtcattgatgggcagctcatagagagcagcaggaggcaagatgacagacatctgaagaggtctaagccccttcagcttttgagattcttggtctaccaaaacagtagaaatagctagggaatgagataagggagagttcaaaaaggacttcaacagtatttgtcagcatttgttcaatattggggatttacacatgtggtacaatataacattccctacttttctcagtttggaatttttaattttaacacttttttttgagacagggtctcactctgttacctaggctcgagtagagtggcacaatcactgctcactgcagcctcgacttgccaggctcaagcaatccttctaactcagcatcttgagtagctgggactacaggcatgcaccaccatgtcccgctaaatcgttattttattttatttttgtattgacagggtctccctatgttgcccagcctggtatcaaaactcctgggctcaagctgtcctcccgcttcagccaaccaaagtgctaggattacaggtgtgagccactgcaccaagcctaaactaacacttttaatataaaaaaagaagaaatttaattgtgttattaagataactcccccccccccaaaaaaaaagagtactgtattcttggtcttttacatggtttccctttaaacttcctcagctttccttcagggaggctgtaattcccagtttagtttaagggtaaggggatttaaataagacacagttggtatgcatgcctgttacacaaacatacattgatgtgggtgaaatcaattgttcaataaaagtcaaaaataatttctgtatcactacagcaatgttgcccattagacaaagagtggcattacaaaattactaactcatgatatagtccagatataaaatatcaacactattaacattttgggctcaataattttttgctgtgggccattctgtgcattgtaggttattgagcagtcattatccctagtcctcaccagcagatgtcagtagcacgtcccctgacttgtgacaaccaaatatgtctccagtaaatgtctggagaaggcaaaatcagctctagttgagaactactaatatagacaagcatacactgcttgccagataacagcaacacaagattcataaagtccatggataccagaggccctagaattagcaaatcttccctacagaactcccagcccacatccagaccaataatacaaaaagaagtcgtaagaaaacaaagctaataatgcaccagctaaaatctttcttaggaatgagtatagcacagtgatccagagcacagactgggaaccagaattcaccagctgcaccactctccagctgcatagcctggggcaagtggctttacatggattatttcaacttgctcacctctaaactgggaagacaactaatacctacctcctagggttactgcaaggattaagtgaaataatacctataaagtacttaaaagaatgcctgggacataagtgctcaataagtgttagctattataatgtctctaaaattccttattttcactttatataaagttttttgttgttgttgttgctgttttttgtgtttttttttttttttttaagagacagagtctcgctgcgcagcccatgctgggagtgtagtcgtgcaatcatagctcctgctgccacacacttgggaatcatcctccttccttggcctcccaaaaagctgggactacaagtgcatgccaccacaaccggctaattttttttttatttttttgtagagacagggtttcaatgtgtggcctagcctagtcttaaactcttggcctcaaaagatcatcccaacttggcctcccaaatgctgggattacaggcgtgagccactgtacccagcctacataaagctgaaatcactttactgatctcaacatacaatacggtatagacaatgaagtattattctatgtaattactttacctacttgacagaggattttcacctattttctccatctcaatacactggtaatgattatccaaagaatagccattggagaaaaaagtatatctgcaagtcactgacaaggactagctaaaccgtaaatctggctatgagggatgatcacaaagattaatatcaacaatgattcccaaacatattagccagggagagctcggtaacattaatatgtaagtagagattaagcgcagaactatgaatttcaggagctttgagaggaaatgactcaatttacgacccttcctcagaagtggatatctaccccaattacctttgttaatcagggcctgatgactagtttccaagatctacctgaatcacagtagggtcacttagctgtagtgtggaactcaatacaacgcatgctccgttcagctgttttgtcgagcttttcagaaaacagcatgaccttactgcacccactccttctgaagaagctaaagtggtttatcaagcataaaagcaaaactgtctgtcaaagtcaaaatgagaaaacatctcaggccatgctaaaatggactatggataatacgcagtgagagatctagaagtacttctaaatgaggccagctcccagatacacttcaagagtgtagctgacacccctgcctaggacacatcgatacatctgtatctattgtatgtgatcctgctacctgaacgtaacagccagatccaagggcagatactgactaagtgaggccgggcacggtggctcacgcctgtaatcccagcactttgggaggccgaggcgagtggatcatgaggtcaggagatcgagcccatcctggctaacacggtgaaaccccatctctactaaaaatacaaaaaaaaaaaaaaaaaaattagcctggcatggttgcgggcgcctgtagtcccagctactcgggaggctgaggaaggagaatggcatgaacccgggaggcagagcttgcagtgagccgagatcgcgccactgcactccagcctgggcaacagagcgagattccgtctcaaaaaagaaaaaaagaagatactaagttgggtctctaaggatttttcccacagggacagagtggcccagggaatggaagtcgctggagctgagtcacattaagcacattaagcacaccaatgtaggaagaagcatcacattcgcccattgctgaggtccgccccatctgtcttgactctttctcttcctgttaaaaattatccaaacttggccgggcgtggtggctcacgcctgtaatcccagcactttgggaggctgaggcggacagatcacctgagctcaggagtttgagaccatcctggctaacaaagtgaaaccccgtctctattaaaaatacaaaaaattagccggatgtggtagcacatgcctgtagtcccagctactcgggaggctgaggcaggagaatcacttgaacccaggaggcgaaggttgcagtgagctgagattgcgccattgcactccagcctgggcgacagagcaagactccctctcaaagaaaaaaaaaatatccaaacttttatcaaaggaacataaaacactaatttcctttaaactcctatccctgtgagaaacactgacttggaggatgtgacttcacaagcaagaaagctgaaatcagaaaccaggactctaatccaaatccactaactcctctgatctgttgctgacctataaaaagagactaataccatgcaatgaacgttagttgttctgccaccaaatacccattcccttccctggtaataaaagcccacgatttcccttcgagaattcacctctccccatctctcagaccatgtggttcctgaagagctaactccaccagggatgtggggtggcatgtgacactaactggccaatccgagcctcacagccctgaacacagggattggctcagggtaggccatatgaccctgtaagagccaatgagacaccatgagactcgctgaggcttctgggaaagaaactgaagctccttgcagctgaatctaaattctgagaaactacagggggttgaatataccgcagccatttttcttacagtgtcagcaactgaagtctatacaggaaaaggcagagctgattcacagggagaaactaagtcctgatgacatcacctgacccctgaatccagctctggctagctgtgcctggacttcgaagttaggtaagccaagaaacttttttccagcttaagtcagtttaggttgatatttcaggcagttggaaccaagacagtcttaatttagataatctgatcagtaccaaatgagctgataattgtcttgtaaaatagtgtatacacgattattaataacaatgatcatgttatttattactaataacagtaagtgtaaagagaaaaaataagtgagcatgggagacaaatggcttagtgtgatatatgattcttctgtgtcttaaaaatataagcctaggtttccatgcccatagtgctcatgcaaacatggtgaacgttgctaaaacccgccggactttctgtaagaagtgtggcaagcaccaaccccacaaaacgacacagtacaagggcaaggattctctgtatgcccagggaaagcagcgttatgacatgaaacagagtggctatggtgggcaaactaagccgatcttccggaagaaggctaaaactacaaagacgactgtgctaagacttgagtgcgttgagcccaaacagatctaagagaatgctggctattaaaaagatgcaagcattttgaactggaaggagataagagaaagggtcaagtgatccagttctatgtgtcatcttttattatgaagacaataaaatcttgagtttatgtttaaaaaattacatatatatataagcccaaagcatttgttttaacaacttataaagttacttcagtaataacaagaagcttttactgaaggttcatcgtgtgccagatgtttaaaagattatatgtacgtaatctaatttaatcctcacaatgaccctataaagtagatattagaattgttattatcattcccattcacagatgaggaaactgaagcacagagttaacttatccagttacactgtaaacgacagaggcaggattcaaatccaggcagcccgacaactcctacttttaccacgacactgattctgagcccacaagcaactaaggttctaatgctattccaacagagtaaaaactcaaagtccagcactcccaaaagcaccaaatgtgacagtgaaatatcaccttttaattctgaaacagggttaacatagttctgcattataaaaagtatgtctgtgttagtaaccgcaatgttagtgattaccattttaaaaaatgtaaaacacacacacacccctaagccaattatctccttggttaagcaaaaatcctaagtgtcccaagacaaaggagtgtattaattagcaccatctttccataaaatggtaacatttgcatccttccacaaaagtcaactttcagacagtatcccatccctaacttactttttgccacttttataaaacagaaacttgttctaaaattgattcatcttagcacaatctgacaaaagagcaaaatcgataaattttatcaaaattaaacatttttgtaccatgaaaaagacactgttaaaagaataaaagacaagttagagactgggagaaattttgtgcaaatcacttatttgaaaaaggattcagatctgaaatataaagaactccctgacgggcgtggtggctcacacctgtaatcccagcactttgggaggctgaggcgagtgaatcacaaggtcaagcgatcaagaccatcctggccaacatggtgaaaccccatctttcctaaaaatacaaaaattatctgggtgtggtggcgtgcacctgtagtcccagctactcgggaggctgaggcaggagatcgcttgaacacaggaggcggaggttgcagtgagccgagatcgcaccactgcactccagcctagcaacagggtgagactccatctcaaaaaaaaaaaaaagaaaaaaggaaaaaaaaaaagaactcccaacagtcaacaataagaaaactaaccaaataaaaactgagcaacagatttcaacagatactcccaaacaggatataatgataacaaataagcacataaaagatgttcagtgttattagccattagggaaatgcaaactaaagccatgattagattccactacatacctattagaatggctaaattaaaaatattgataacaccaagggatgtacagtaactggaaccctcatacatggctagtaggaatataaaatgatttagccactctggaaaaagggtttgcagcttcttataaaatcaaatacacacactacactatatgacccagcaatccccttcgcccctcagataccacagagaaatgaaaactatgttcacacaaagatctgaacacaaatgttcataacagttctattcataattgctaaaagtggaaacaactcaaacgtcctttaatgagtgaataaacagacctctttgtgatataaaactactcagcaacaaaaaggaacaagtattcaatatatgcaataacttgaattaatctcaaaaacattatgccacataaaagaccccagtctcaaaagctgacatactgtatgattccatttatacaatcttattctcaaaaatataaaactataaaaatgaagaacaagatcagtggttgtgagcaggtatggggtgggtaggggtaactataaaagaatagcatgagggagtttttagggtgatgacactgccctgtatcctgattgtggtgatggctgcacaaactagacatgtgttaaattagtaaaactgtatagcaaaaaacatcaattttactatatgctaatttttataaaattgtaagaattatttttaaaatatgacctaaatgtcacatttgactttttttttttttttaagatggagtctcactctgtcgcccaggttggagtgcagtggcgtgacctcagctcactgcaacctccacctcccaggttcaagcaattttcctgcctcagcctccccagtagctgggactacaggcacacaccaccacacccagctaatttttgtattttcagtagacggtttcgccatgttggccaggatgatcttgatctcttgacctcatgatctgcccacctcggcctcccaaagtgctgggattacaggtgtgagccaccacacccaaccgacatgattttttaaaactacaaagaagaaaatgcagcaggataagtgtgctgtgaataaacagaaaacccatgcacttcccttcctgcatatgtaggttttagagacaagaatggagcctcaaaaagaacctctccaaatggaacaatgattgagctctcttggcaaaaaatgtagaatacttttgaagaattgcatcatagctagatggttggtccaggaccaaaagtaaatgctggaagaaaaacaaaatcaatctttccactctgaacctctgtctgtgacagtatgagaagaaccaccagaccaccttgaaatcaagtcatgaaatatgcttttattttaaaaatcagctatattcctcaaattaacttctcttgttaatgtagttatggtcttctttgatctcaaaagaccaaatcctttgttaacagagagactttaagcaaaagtaaactgatcaaatagcaagaggccacagtagtaactaaaatttcttctatctaaattcaagatgatttctgcatctctgtcttatacatttgcctattagaaaaaaaatatgtatctaccacataattaacttaggtgcaatgaatcagactgcatttctaaaggttttagaagactgatgagttatgttaaccataatcactatctcctttgatagaaattactaacatccgtaattggttcttaatcagaccccaagatatctttacttactaggctatataaacaataaaacttaaaggacaaatataataaaatgcacgtttcattatataacaaaacaaaaatttgtatcagaagaattgctagaaaaaattggatatccacattttttaagttagttatttgccattaattcttctaattgctttccttgtggaaattcggttactaacctgaaactagaaagtaaatacactttgggaggcccaggccagcagattgctgagcttaggagttcgagaccagccagggcaacatggcgaaaccccgcctctaccaaaaatacaaaaaattagctgggagtggtggcacaagcctgtagtcccagctacttggaagctgagacatgagaattgcttgaacccgggaggcagaggttgcagtgagcagagatcaccccactgaactccagccaggatgacagaggagactttgtctcaaaaaaaaaaaaaatttattgtgacgaaagaaaagccaaattgatacattattattattattattattattattagagacagagtttcactcttgttgcccaggctggagtgcaataacgcaatctcggctcactgcaacctccacctcccaggttcaagagattcccctgcccgagcctcccaagtagctggtattacaggcatacgccaccacaccaggctaattttgtatttttagtggagtcagggtgtctctgtgttggtgaggctggtctcaaactcccaacctcaggtgatccgcccgcctcggccacccaaagtgctgggattacaggcatgagccactgcacccagctgatacataattaaagtaacccaagtgaagaggaagaaagcctatcagaatgtgcccctttccccactgagcagcaaggccctggtaagccagtgtggctaaagtgtatcatgcttcctgagggagaaaaagtatactttagagatggcacaataactctgaaatgcctataaaataatgtcaaagctcattaacagatatccgggccaccaccaatctggctacaacctcacttgcccatcaccccaacacaggccccaagtacacagtcaggcctctgagactctgataacattgttccctctgcccagaacatcctttcctcgcctctctctggacctaaatcctacccagattttaacgaatgcttcaacatctacttctctaagatgctctcctcccaaaactaaaatagcattacttcctatagaattaattggcctctgaatcatctattatcttgagttaaatgcatcgtgtaaaatgccttatctgcccaacacaactatcttataaattagaatccattttataccatctttatccccatgacaaccattcaattcactaaaaccattccataaataattaaatttcccaaagatgacctaaatgccaagcataccaagaactgtcctgtaccaaattcagttctcattagcatgtcaagtcacaaagaggcatgttttattaccttttagttcatctgcatttttccaaaactggaatctatatagtcctatagtatacacaggcaaaatagtctgcaaagtagttttactcattgtactgtacttaatattcagccagacttgcatttttctctaaaacataaaatcactgagtatgcaagaagcattagaagagagactaagcctacagagaagaaaactagaaactaagatcatcaaccgtggtctcttttgaataatcattttcataaagaggtaaattctcttaaattttagaataagtggaatttagtagagtatagaatgttttaaatacataaaagaaatatcctgatgggccttctgccatctgttttaatgactgagataaactgaattttctaaaaattatatcaacagctaaaattgagattttttttccatctattactttgatttttcctgatccatttttcagggtttccagcaattctggagctagccttcttagtttcaagaattccaaattgtttcttgaagagtttgagcctcttcccaaatcacttaacatgcttattaatttaaaagatatgaagaaacaaaaaacccatacttaagaagcaagcaaggctgggcacagtggctcatgcctgtaatcccagcactttgggaggccgaggcaggcggatcacgaggtcaagagatggagaccatcctggccaacatggtgaaaccctgtctctactaaaaacacaaaaaattagctggggttggtggtgcattcctgtaatcccagctacttgggaagctgaggcaggagaatcgcttgaacctgggaggcagaggttgcagtgagctaagatcgcggcattgtactccagcctggtggcagagtgagactccatctcaaaaaaaaaaaaaaaaaagcaagcaaattatactaaaaggctgacttctagaaaaggttactgcttgccaagaaaattatattactataaaacattgtctattctttttgtttcttgatttttgcttccagattatctgtgtagacacagaatcacattactactaccaccagtactatcacagccccttaaaagccatcttcaatttaccaacagattatgttctaatgctgtattttcaaatcagactttaaaactgagaacagagttttctatacagtgttaacaataaggttactgggaagatttaaagtgacaaaagcaagttacaaaataatatatatggtataatcccattttgtaagtaaaaaacagattataaataatggtcatctcatttttgtgaaatatgtaagtattgaatattttgcataagaaaatcaggaaggataagacacagtctaatcatgaagaaaataccagagaaacccaaattgaggaccattctattaaatatccaaatagtactcctgaaaactgtcatgaaaaacaaagtctgagaggctatcacagcccaaaaaagactaagaagacaaaactgctacattcattgcaggattctggatagattctggaacagaaaaagggtattagtgggaaaactggtgaaatccaaataaagtctaaaaattagttaatagaaatgtaccaacaatggctgggtgtggtggctcacgcatgtaatcccagcactttgggaggccaagccaagtggatcacaaggtcaggagatcgagaccatcctggctaacatggtgaaaccccatctctactaaaaatggaaacaattagccaggcgtggtggcaggcgcctgtagtcctagctactcgggaggttgaggaaggagaatggcgtgaacccgggaggcggagcttgcagtgagccgagatcatgccactgaactccaccctgggtgacagagccagactctgtcggaaaaaaaaaaaaaaaaagaaatgtaccaacaatggtttcttacatttgacaaacgtgccgtggaaacctaagacattaacaatggggaaaactgggtaaagagtttatgagaactctgacctatacttcttaattttctgtaaatctaaaattattacaaaatgaaaagtttattacaggccaggtgcggtggctcacacctgtaatcctagcactttgggaggcggagatgggtggatcacctgagatcaggagttcaagaccagcctggccgatatggtgaaaccctgtctctactaaaaatacaaaacttaaccaggcgtggtggcaggcgcctgtaatcccagctactcaggaggctgaggcaggagaattgcttgaactcgggagggggaagttgcagtgagccaagatcacaccattgtactctagcctgggacaaagagcaagactccatctcaaaaaaaaaaaaaaaaaaaaaaagtttactacaaaaataaaactgggtatctccaggtgatgctattacagcttttttattcatctgtattttataatttttttttttcgagatagagcctcgctctgtcacccaggctagagtgcagtggcacaatctcagctcactgcaacctccgcctcccaggttcaagcgattctccttcctcaacctcctgagtagctgagattacaggcacacaccaccataaccggctatgcccggctaatttttgtatttttagtagagacggggtttcaccatgtcggccaggccggtctccaactcttgacctcatgatccgcccgcctcagcctcccaaaatgttgggattacaggcgtgagcccctgtgtctggcattgtattttaaaatttttaacaagcaataagttttcattgtcatggaaaacaagacttagtcccagaagacttaagttaattcgcccaaagacacaaaattgcggcagcataggaattctggaattaattctctttactctagaccccatgcagagacctaagaacataccctattaaactttttgactcttcttacttgctaatacacaaaatttaaggtcaccagattacttttgcttcactataattgatgcagagggaggaaacagatgaaacaatactgagagctgttgaagttggacaatgggtacatgggcattgattacactcttctttctacttttgtatgtctgaaaatgtccataataaaaaacttttaattaaaaaataaccagcctgggcttggcgcagtggctcacgcctgtaatcccagcactttgggaggccaaggtaggtggatcacttgagttcaggagttcgagatcagactggccaactgagtgaaaccctgtctctactacaaatacaaaaattagctgggcatggtggcacatgactgtaatcccagctactgggaaggctgaggcaggagaattgctcgaacctgggaggcagaggttgcagtgagtcgagatcgagccattgcactccagcttaggcgaagaagcgagactccgtctcaaaaaaataaaataaacataaccagcctggccaacatggtgaaaccccatatccactaaaaacacaaaaattagccgggtgtgatggcatgcccctgtgatcccagctacttgggaagctgaggtgggagaatcgcttaaacctgggatgcggaggctgcagtgagctgagatcgcaccactgcactccaggctgggtgacagagcaagaccctgtctcaaaaaatttaaaaataaaattaaaagatagaaaataaagtcctcactccccaacataactatggcacttcctactctctattgagcactgctgcctgggtgaggagacaccaccgctaagaaccttcagcatttctcagtgtgaagcagagagaaaagtcatggactgggaatcttgaagcttccatgttggttctactttaactaattgtgagacctcactgagtcctcttaacttttcagggccctaaacttccttagctgttgccccaataatctctgaagttccttctaggattaaaattctgatttcaactttctacaagctccttaaactcaacacaatcaaaaccaaattcatcttcattctaaactcctaagagccattctccctcctgacttccctattcttttttttctttaatgtcccattcttccagccacccaaccataaaaaccacagcctcatctctgacttgagacatagaactcaagttctgtatacatagaaacccccacccccgtctctactaaaaatacaaaaattagccaggtgtggtgtcgggcacctgtaatcccagctactcgggaggctgaggcacgagaatcgcttgaacccgggaggcagaggttgcagtgagctgagatagcaccatggcactccagcctgggcgacagacagactccatctcaaaaaaaaaaaaaaaaagagagagagagagagaactttgggaggccaaggtaggtggatggcttgagctcaggagttcaagaccagctgggcaacgtgggagacccccatctctacaaaaaatacaaaaattaggtgggcgtggtagcttgtgcctctaatcccagctactagggaggctgaagcaggaaaattgcttgaacctaggaggcagaggttacaaagagccgagatggagccactgtactccaaaaaaaaaaaaaaaagaaagaaaaaagaaaaaaaaaaacacagagatacagaattaattgttcccaccctaccccatctaattagtcaccacatctctccattcaacctccaagataactcttgaatcctttccatggccaccaactcaattcaggttctcatcgccctcacttagactactatgaacccaactaaaggccctgtctctcagttctcttccctacaatccatcatactcatccttactctaacattcaagaaattccaaggccaagcgtggtggctcaggcctgtaatcccagcactttgggaggccaagtgcttcaggccaggagttcaagacagcctggggaacatagcaagacccctaactttataaaaaataaaaataacaaaaagttaaatattaaaaaaaaaactccccaaaacccagtcctgacctattggcagtcttaccttccattatattcctttatgtatcctaggacccaggaaacttggatatgcaatttcctgacacccacatttctgacataacccccagacttccctccagaatgccctcttccctttgcttctcggcttcctggtggtgtgatttaaatgccacctcttcagtggaagtgttccctgatatccccaagaaggcagtatcgctccctccacttaatcccgaagtaccttgtatggcccccttcaatggcacctatgaaattcctattagtcctttcattttggggtgccccattctctctacagataattagttccttgtcaacggaacaatgtttccttcatgtttggatccctcagaacagagcttctcaaagggtgtgccatggcacactggtatgccctgaatgagttaaagatggcctagacagtggtggtcttctcagcaatccaagcagccacaaagagacaacagaaggccgggcgcggtggctcacacctgtaatcccagcactttgggaggccaaggcgggtggatcacgaggtcagaagttcaagaccagcctgaacaacatggtgaaaccccgtctctactaaaaatacaaaaattagcagggcatggtagtgcgcacctgtaatcccagatactcaggaggctgaggcaggaaaatcacttgaaccagggaggcggaggctgcagtgagtcgagatcgtgtcactgtactccagcctgggcaacagagcgagactccctcacaaaaaaaaaaaaaagagagagacaacagaagccagaacccacaaatggtcaagcctcaagcagtgtcctgcttcaacccagcacatgccatcacaagaacttgagaaccactcagaggagcagtgatacaaaggggctcacagcagatgcccaataaatacttgctgaactgaatcctggaataatccatctgttccccttcaaacactcttcccaagatcatttaccattttgaccacacactcttttttttttttttttttttttttgagacggagtctccctcttttgcccaggctgtacgcagtggtgctatctctatctcggctcactgcaagctccacctcccgggttcacaccattctcctgcctcagactcccgagtagctgggactacaggcacctgccaccacgcccggctaattttttgtatttttagaagagacggggtttcatcgtgttagccaggatggtctcgatctcctgacctcctgatccgcccgccttggcctcccaaagtgctgggattacaggcgtgagccactgcacccagcctcgaccacacactcttgtgaacaatttttactgaccatattataccagccttaccattcaaagcctacaatagttaattgcataatatagcaactgatatcaacaaacagttcaccataaagaggctcaaatagttaaattcaacattatataacaaagaaatgaaagtgccattttacactattaaattcacaaaaacttctgaagaaaaatggttttctctactacttatggtaaaacaggtatatccatatatctgttaggagcacaaactggtataacacccttgaaaacagtaggacaatatatgtgaggagccataaaaacactgataccccttaacataataacacactccaaaatttatccttaagatatcattagaaaaaatgcaacagtatctacaatgatgtagattaaagtgttaactgaaaaccacccagacagcagtataaatacttcacataaaaagacttaggtaaattgtagcatgacttgatgaaattatttttgcagcctttcaatatataaagttaaattataaaatctataagatgtaaatgtttcatgatatagtaagtttttaaaaatcaaactataatgtatcataatttaaaatgaattttaaaatgtatattttgaaatgaaatgccaaaaagaaaatcaattgtcttaggataataacccaacatttaacaatttatttattatcaatttattcaacattaaataataaagttctaccctaccaaggaaatgaaggggttccaggacacaagcttgataaagtctcaaaaggaccacccctcccttctactgctcactttggccttgactgagtgttttcatactctccttggtcatgatgacctatactaacccaaaccccagtttttcaaggaccagccaactgcctcaattggtcctctgatcatccctatgaacccgtgggagacaaatcatgcaaaacaagcgaacactcaagaaacaaagaacctggccgggcgtagtggttcacgcctgtaatcccagcactttgggaggccaaggcgggtggatcacctgaggtcaggaattcgagaccagtctgaccaacatggcaaagtcccaagctactagggaggctgaggcaagagaatcgcttgaacccaggaggcagaggttgcagtgagccgagatcccaccagtgtactccagcctgggcgacagagtgagactctgtctcgaaaaaaaacaatttttttgatttatttattagtttaacatttattactttaacaatttacttatttattactttaaccaatcagcaagtagtcagcccaagtttcactgtaaaccctaaaaatatacaatattgccacattaaagtctctgggattctcaaggctaacttgctgacttagcagtggactgtatcagttaaaaggcagtgtggactcagacaatcaaagaaccaggggccaggagacctgagaacaattaaaagcaaaatgtagatagattttttttttaactacaaaaaacacaaagctaaaaagtccagcttaaaccagatgagtaaaaaaatagctggagatattcttttaagtcttagccagagtgcaaaagggaggatggaaagtcattttattaagagctgaagctagcccggcacagtggctcacacctgtaatcccagctctttgggaggccaaggcgggtggatcacttgaggtcaggagttcgagaccagcctgaccaacatggtgaacccccatctccagtaaaaatacaaaattagtcaggcgtggtagcgcacacctatagtcccagctacttgggaggctgaggcaggagaatcacttgaacccaagaggcagaggttacagtgagctgagatcgccccattgcactccagcctgggcaacaaaagcaagactccatctcaaaaaaaaaaaaaaaaagacctgaagctttttgcggatgaagatatctcacaaaagacaagtactgaaaattcatggccaggcatggtggctcacacctgtaattccagcactttgggaggccaaggcaggtggatcatgaggtcaggagtttgagaccagcctggccaacataatgaaaccccgtctttactaaaaatacaaaaaaattagccaggcatggtggcaggcacctataattccagctacttgggaggctaaggtaaggagaatcgcttgaacctgggaggcagaggttgcagtgagctgagattgcaccactgcactccagcctgggcgacactgccaagactctgtctctcaaaaaaaaaaaaaaaaaaaaaggaagaaaattaatttaaaaataattttaggtcgggtgcggtggctcacgcctgtaatcctgacactttgggaggccgaagcgagtggatcacctgaggtcaggggtttgaggccagcctggccaacatggtaaagccctggctctactaaaaatacaaaaagtagctgggcatggtggcgggcgcctgtaatcccagctactcaggaggctgaggcaggagaattgcttgaacccaggaggcggaggttgcagtgagccgagatcgtgccattcattgcactccagcctaggtgacaaaagcgaaactccgtctcaaaaaaataataataattttaactctgatgcctcataaggaaagtattaaaagccttctaatttatttctgtagtattaccattttctaagtgtaataatgaaagacgaagacaccatagctgaccaagaagattaattactgtgaaataataaatactcaagactaaactgtttttaattaacaggtatttcagcaaaaagtaaataatctgaaagactaatagtatcaatagaggtagtacaaccactaggaaaaaaagttcaaccttttgtttctattgatatgttctccatatttagatcctcaaaactgcagatatatacagtcattcatgacactatgtaaatagcagataacaggaaaaacaattcaatacttaaccaagttcactggagcacaaagtaatcgccactcaagaatgctgacacaaaaactgaaggacctctcaagttccaatagcacgcagataagctgagcccctatgcagttactcatctgaacagaagtggaagattaacctaccctcactcatttcacacactaacctgacaaggcagcaggcagtctcttcggagcttgttcatcattcagtctgttccagaagtaaccgattccgttaggatctgtgccttcaggttaccactgtttcactacagccctgtatcacttcacccttgtcccaccttattctttcaggcattataaaattcttgttttctaaataaagttctaaaccttactcacctgcagttcactgcactgggtatcacccaaatagcccatcagagctctttataatttctgaaagacaaagaagaaagtttttttaatacatagtagaaaacaccattcaccaagatatcagttccaaagcatttgtatccaatattcccagcatatggtcttttggtccacactagttcaataaaatgtagcatgaccagcactagaccaagagtcttgagataagcctccaaagattaaaaacaagcttggtttaatgttgctactactgagctgtgtgaccttgagcaactcatttaatttcttcaggcctatatttccttatctggaaaataagtcacttagactagctagagaaagaagagcacaggctttccaggaagaacaccagctccactactttactggtctcgtgacgttacattagttgagtcacacttaagcctgaatttcttcctttgtaaaatggaaataactatctcgtgagttgctatgagaattaaaggagatgatgagttataaaaagcctatagtaaatatactgtgcagcttatcctaaaattcaacagatggtaattcattactaccattaacccccaccagccctaacattacatgaattcaattcatgcatatttcttttaaaagatcaacaaatcaaaactttaccaacctgactaaagaactaactgttttcatgtttcacaattcaaattacagttatcttaagctgatggtagtttatcattattacttatcacagaaaataagaacagaatagtccctgcacaacatccaaactctggttcaatgaccatgccttttctgacttctcactctacttccacactgccagaatatctcaggaatagagaggtcttccaaaagctaaatgacacccagctgtttgccagattcagctcaagggagcaggactagagacagaagaagaacagaggcttttcttttttttaaccttttttactttacataagtactgctcaaatttgtttaccataagcatacaggagttttgcataaaagtaaataattttttaaaactgtattagttaaacacgttgcctactgacaggaagctcgcattataggacattttcatcacaacaaagataatttctgcagaaggaagcaaaaaggcaaattcagatgtgacaagaacacctaaaatatagcacagaaatgacaaaaatcacaaacattcacacttcagaatagttcagtcaacaaagatgccatgcattctttgaagaacctgacgatgaatcaagttcttttttgttcaaagacaagatatatgtatacactctgctttaccaaacaacttcctgctcttacttggagaaactgacccagtacaattcacaaaagtaaacaagttggtatgactgttggtattagttgaaaaactttccatttcttttgaataattaaaagttgaccaaaatagttattacatgtatatataaataaaattcttcctgttacatctacagtggtcttttaaaaagaggaatattcacttctaacagattcaagattactgaaaactattatcccagccaccctcaaagcaataaaccatcatgttatatgctgcttctagccaatgctacagaagtaaccctgactgcactcatcaactgaaatgaatggtaagatagtatggcatactctccacttgtatcacttttcttctagaaaacatttcaaaacattacttagaaatccaattacatctgcatgtatattcacctaagtttatgaaaattaaacctaaaaatttgcttataattttttaagtagttcctccccatctcttggataactgttgttgatacacctggcccgaaatcttctatacatttgaaacaacaggcaaaggtccttatttcttgtatggggcctgtatttggatcttagggtctctgacagacaattatagactaatctacattcaatattaatgccaagcctactgcttaaatagagaacacatgcatctgtaagatctgggctacttacttgtaggtccctctgcactattcttagcctttcatgaatatgctgtagattttttaattacacgaggccctttgcaagtaaaaatgacttttcctgttgttttggcatcactcctcttccagtgaaaactggacagtctataaatatataccaactttaagacaatgcattttaatatctatggcattagaaaataaaacttcttgttaacaaatgcaataatcaagtttaccagctaatagaaaggtacttactcccaaaaactacagccttacctaaaaatagtgtcctagcttcccagccaaaaggacagactaaaaaagctctgtctttattcagctcagagacacagacttctacctcaccacaaccttcaatactatggcatttcccattttagaatactttgtgtaacaagttgttcagtggccaaccactaacttcgctttgaaatgaatactaacacttcacagagtctacatgtgtgagaactgtggaaaatgtcttgacacaattcaggtcaaacaacactagccacacaagattacctacttctaagtattccattttagactacaaacaaacatctccacagtcaaaaagcagaccactggctcctttccacaaaattatctgtaggcttcaagaaaaaagataaggccaggcatggtggctcacgcttgtaatcccagcactttgggaggccaaggcgggcagatcacctgaggtcaggagctcgagaccagcctgaccaacatggtgaaaccctctctctactaaaaatacaaaattagccgggtgtggtggcgtaagcctgtaatccctactcgggaagctgaggcaggagaattgcttgaacctggaaggtagaggttgcagtgagctgagatcgcgtcattgcactccagcctgggcaacaagagtgaaactctgtctcaaaaaaaaaaaaaaagaaaaaaaatctatctatctatatacatagatacacacatatatacacatatatacatatatacacacatatctatacacacatatatgtatatatacacacatatatgtatatatacacacatatatgtatatatacacacatatatgtatatatacacacatatataaagttcaaattgggaggtctaaggcaggaatatgcctccatctgcaaaataaaaataaatttaaaaatccatatttgctctgccaaaaataaaaattatatgaaataaacataagcactgctgagtttcaaacacaagaaaatgcagtatgtgcacttacaaaagaatcttggtttatgtccaccttcctttcctaagtttttatttttttaaggcaaaatgtcaattacatgcctcaatctagaaaaaaaaaaaaggatagcttattcttcttaaacagatgttgtgatagacacgaaaaatttgtgagaggatttcaaaatccagaggcccagatgtgtggagaaacaacaaaaaaaaaactacagtaaccaatcgaccacaattacttattatttttctaaaaaaaaacttagtaaaacattttaagttgagaaaactcgtgaaaaatgtaaaagtagcaaacttctcttcctctctatagcacagaaaactattcactaacactgtatcaataatatcctttaaatccaaagcattacaaattagattaaataaagcactttgaataaattcacacaccgtgtgtgatcaggacataatgacaaactagtctatttcctaataagctaaacagatctcaacactatcatctttatttcaaaataattattaaagagaaaagtactactccatttttcagaaaataaaagcaggagtgattgacctgcctaattctttctaacggaaagggtatactttacgagtcccacaaaccaggtacacacaaaatccatatacataatcaccgggactaaacgtacagtaggtgatagacaccaaaacacaaataaaattaagacatccaagtaaagttacgcaagaaaatttgaataggcaaactataattatccctggtgaagatactgatcaagaatagctgcaagtaacatttggctcttagttaagtaccactatgtttgagtatgttggagcaactgaaaagattggtacattcaacatatttttcctttctaaatctagccctgcccatagacccactgactgagtgatacatttggaaaacaaagatggccccatcaaattactcagtttcagccttactcttaccagttgattaaaataaagaaggaaaaaaaggaaatcatttttaactgcagtctcaccttacacatctcaccagcactgtagttcattagtgatccattacttcatccaaatcctgaggcaaatagaaaagatgtttccatacaacaccagtaacagacattatcagtagcaaacattttatcagcctgaagtgaaagggcatctacatttaaaatggaaaaagttacaaaaatggtacagtgtgcagctttgcaaatgagtctggtttttgaccttaaaacatttcctttcagtaaggtaaaagaatagattatacaatgctcttaaaactcaaaaacataataaaatcatctttttcaacacagactgaccttactttcaaaaacataaagaaatgaaggagaggaaatttcattaatatgagtttaagagagagcaaaattaagaacaaactaggcaagacagacaactcctccctccttcccccgctccaggaatccactgtctctgaagttacactttttattatattaatgatttgcctgagaagtgttaagttgtgagggagaaggaatgacaatttttgaactgcaaacaaaacctgaggatcccgatccaagaacaatcagaggaccctggcttccagccctgtctgaagatttctcagcaaaggcgagggtgcagaaggctccaataatttaggggagaggaatcgaagttccctaggtaagactgcagtctgtgagcccttgaaaagggtactggagtactctcaaggaatctccaggaaaagagagcctatctttatttttgttgatgtgcttgtgggccaaagagcatttccgaggagggggcggggaaaggggggaagaaagtgaatctcgggccgagagccctccgcgggggagggagggggcgcacgcctgacccacttttccccacgcccccgctccagcccccaccccacccggtggaagtccgaggcctgagggggggcatcgagcggggcgtgggaggcccgcacgctccccacccccagccgcgacccggaggaggggaacgtgccgggaggctcgagtccccctcccagagtgctctgggccggagaaacctcccgcaggctcccgggccaggcgtgcaaggccccctctcctgccagggcccaggacgctgcgggccccagcggaggggaaggggactaagtaggggaagaagctgtaaacagccccagcgtccgggcctcgcctcgaagagccgcgcttcccaggcccagccgcgggccgcccaggcccccagcctgccccggggccgccgcgcccggggtccgggacaccggaggggagtcgggtcccctccccggagagctccgggagctcgcggagcggccccaggagcagagaagggggaagtcaggacttacctgtcattactttctacgccatcttggatccacttgtcaacgtccccacaaagcattatgggtaagaaagagcctttaaagtgactccccccggcccccgactcccgcctcccgccgccggcgccgccccctccggccgcgcctcccgcccggaaagttgccccgggtggactgccgaccccggcgcccgcagctggccccttcccctcccccgggctgacggcattgaaaattcacccgcatttttaaaacgtggctttggggttttctccctttctcctgccccggcctccctgcccccacgcccggtcctctcgcctcgccgcgttcctgcccgggcagacgccccgcgtctgcattgaatcaacccgaggtttccttgccgcccgcggcgcggcgcggagctgctcgcggatttatttgtgcgcgtggatgtgagcgtttctgctcctgcggccgcgcttccaggaagcccgcgagcggccggggtcgccttcagaggccgcgcagaccagctccgcacccgccgcccggagaggtgcctctgccctgggaaaccgccccggggccgttgggctccgggaactgggaggacgccgtgtccccgagtccaccagcgtcgaagcacgatttaaaaaaaaaaattgagccaaatgcaactttttaccccttgtttactctgtgtcccgcggtctcctcctccgggcgggtaacgtgatccgcgaccctctaggtggggacccctcccctaggaatgtggctccaggctccgcggagccaccctgggagcgtccgggctgcggactgtgactccggggcaggtaatccggggcgccggctgcgggctccgggcggggcggggcgcggaggcagccagggctcgggggagggtcccgggcggaaagcagggtgcgccagtccgggtccacctggcgggtcgggggagaaccgcgggcgccgctgcagctcgggaggctggaggtggggacgcccggcgtctccgggctgcgacccgctgcgctggaaagtgtggggcgccttggcgcgggctgaggtctctgacccgggcgagtacccccagcccgccggccacactgctgccgggcatcctctccccgcgacaccacgcccgctttcggctgcgcggggcgagcagcgtactgaccccggcgtccagccgcccaggtccccccagcaacggaggccccttggtcagcctcctcccgcgctctccgcagagcctctggtccctgctttgctgtctttggaggcctgctccagttgcttttttttttttccaagcaagtttttacaacaaggagatacccaaaagaaaattctccaagacaggaatgcttgcgaattgtattcggtacaaaatgctgttgaacggctctacctttagaagaccgcagaagcactggcattaaaaccctctttcggtgcacggggagggcctggggccttggatctacccgaggattttacgctcctccagaccctatcaacagcctcactaggaacgtgaacggtggcagacaggagccctgcccctggggagccaaaaactccaccaggcaattgtcccggtctgatgagaaggtgtagacacattaagggattggccccgggtcactcgtgaaggagggaacgaggtagtgagtcattcccagccaagaacgcagcgtgctggggagcaacctcccctgagtcacctgcttctcacctcggaataagtggagaaactggagcctggagccaggttcttagacggcccagcaaggtagccaccaagggcatgggctaggctggggggaggcagcgcccctcctgctggaaaagggaatgcttggcccgtctgaagaaggctccaatgtctctttccagggtaccccaggtgcttcttttccaattcctcttttgcacttatttagccactggtatgcactggcttaatggtggttttgtttgcatggcacctttaggtatgtggtctgagtttatgcaaaagtaatgacaaaagccgcagtgacttttgcacccacctaatataagtaaacaggaaataagttgagggcaaggactgtgtctcccaaacacgtttctttgataagcagcctttctttgccttgtataggcattgacccaaataagtgttcagtttgtgtgactgcccaacccattcactgcctccagtgtgtgcatccaagcccaaccttgtcaaatacaccgcctgttgcctgagctgggacggcctgccgactcttctccctgcccctcctggatacctacaatgcatcctccacctgaccaaccctgtgatattttatgaatgtaaatcagatcgagacttctctgctgaaaccttggaataaaacccagattcccaaccctggcctacaagctcctgtgtgaggtggtcccaccttccctcaccagcagtggtccaggctggccttctctctttccctgcagcgccccaagcttccttccagtgagaaccctattcccccagatcttctgattatcttttctttgacagagtcttgttctgtcgaccaggctagagtgcagtagcgcgatctcaattcactgcaacctccgccttctaggttcaagctgttctctgcctcaacctcctgagtagctgggattacaggcgtccgccaccgcgcccggctcatttttgtatttttagtagagacagggtttcaccatcttggccagggtgatcttgaactactgacctcgtgatccatgcgccttggcctcccaaagtgctgggattacaggcgtgagccaccacgcccgacccatcatcttttcatcatatttaggtcccctcaaagaggacttttgtgatccccctacccagaccaagtcactctgaacacttgacctgtgttagaagttctcttgtttaggtcggacgctgtggctcatgcctgtaatcccagcactttgggaggccaaggtgggtggatcacaaggtcaggagttcaagaccagcctggccaagatggtgaaaccctgtctctactaaaggtacaaaaattacagcgcgcctgtaatcccagctactcgggaggctgaggcaggagaattgcttgaacctggggggccaaggttgcagtgagccaagatcgtgccactgccctccagcctgggtgacagagtgagaattccatctcaaaaaaaaagttctcttgtttgcctgttgttagttgtttcttatctgccccgcccccatttgatcatatgctccctctgggcacaggctctgtctggcttatttgcctcagtgactagaccagggcctggcacatacatagacgctcaccaagtattagtcgagtacatgaccaaacttctctcagggatgggcgtgttgatgaaaaggagtgctaaagtgtgaagtgagatgctgagggccctgcctcgcatctcttcagaccactgaccacacacagctagaggcaggcagaaaggaacagtgttgagggaaaacaggtcccttggccaccactgatttagctcaattctgattctgatctcatgaacacacacagccctaactaactgatccccccgacatcacatccctcttccttcccacattttttctttctcctctgctcccactggccgtggcttcttttcttttcttttttttttttttttttgaaacagtgtctttctctgtcacccaggccggagtgcagtggcgcgatcttggctcactgcaacctccacctcctgggttcaagcgattctcctgcctcagcctcccgaatgctggcaccacaggcacacaccaccacgcccaggtaatttttgtatttttagtagagacagggtttcaccatgttaactaggctggtctcgaactcctagcctgaagtgacccacccgcctcggcttctcaaagtgctgggattacaggtgtgagccactgtgcccggccgcagtgccttcattttctgcttggagagtcccaagtctcagtccttgggtttctcttctacaactacactccctggtcatttgccttagtacaaaaattagctgggcgtggtggtgggcgcctgtaatcccagctactccagaggccagggcaggagaaacgctagaacctgggaggcagaggttgcagtgagttgagatcgtgccactgcactctagcctgggtgacaagagtgagacttcatctcaaaaaaaaaaagagaaataattataatggactgcccacggtggctcacgcctgtaatctcagcactttgagaggccgaggccaggagttcgatcacttgagaccaggagttcgggaccatcctggccaacatggcaaaccctatctctacaaaaaatacaaaatttagctgtgcatggtggctcatgcctgtcatctgatcccagctactcgggaggctgaggcaggagaatcaagaatcgcttgaacctgaggggcggaggttgcagtgagctgagatagcgccactgcactccagtctgggtgacagagtgagactgtctcaaaaaaaaaaaaattataatgccttgaggaatgtaaagtacatctagaattgaaatatttgataacagtgagtataaatctgagaagggcggtggttgcagttagtggagttaaaatggtccaaagtaggccgggcgcggtggctcatgcctgtaatcccagcactttgggaggctgaggaggacggatcacaaggtcaggagatcaagaccatcctggctaacacagtgaaaccccatctctactaaaaatacaaaatatcagctgggtatggtggcgggcgcctatactcgcagctacttgggaggctaaggcaggagaatggcgttaacctgggaggcggagcttgcagtgagcagagatcccgtcactgcactccagcctaggtgacagactgagactccgtctcaaaaaagcaaaaaacaaacaaaaaaaaggtccaaagtatttacattatccagcaatacgactaaagtaccagttaagactagacattgacaaaggcaaagatgcatgttgtaacatctaagttaatcactagacctgtaaaagaatgaataatttccaagctaacatagagggaagacaataataaattcaaaagaaggcaaatactgattaaaaagaccacaaaaggccaggcagggtggctcacgcctgtaatcccaacacttagggaggctgaggcgagcggatcacaaggtcaagagatcgagaccatcctggccaacatggtgaaaccccgtctctactaaaaatacaaaaattagccgggcgtggtggcgggtgcttgtaatcccagctacttgggaggctgaggcaggagaatcgcttgaacccgggaggcagaggttgcaatgagctgagatcgcaccactgcactccagcgtggcaacagagtgagactccatttcaaaaaaaaaaaaaacaaaaaaaaaacacgcaaagtaggtgggatttaaacaaattatatcagtaattactttaaatgtattaataaactaattgctctagttataaaactaattatatgctgttatcaagaagtaaacctaaaagatatggattttaaaaatttaaaatagtataggctgggcgcggtggctcattcctgtaatcgcagcactttgggaggctgaggcaggtggatcacttgaggtcaggagttcaagaccagcctggccaacatggtgaaactccgtctctactaaaaatacaaaaaatagctgggcgtggtggcgcacacctgtaatctcagctagtcagaaggctaccgcaggggaattgcttgaacctgggaggcggaggttgcagggagccgagactgtgccattgcactccagcctgggtgacagagtgagactccgtctcaaaaaaaaaaaaaagaagtaaccatatagacaaagacaagccatgcaaacagagtgaaaagcaacctacggtgactcacgcctgtaatcccagcagtttgggaggctgaggagggtggatcccttgaggccagaagttcaagaccagcctggtcaacatggcgaaagcctgtctctactaaaaatacaaaaattagctgggtgtgatggtgcacacctgtaatcccagctactcagcagactgagaatcgcttgaatccaggaggcggaggttacagtgagccaggatcacaccactgcactccagcctgggcaacaaagtgagagttactgtccccaaaaaaacacacaaaatgaaaggcaacctacagaatgagagaaatgggagaaaatatttataaatcatatatctggtaaggggttaacatccagaatagacaaagaatgcctacaagtcaacaacgaccaaaaaaaaaaaaaaaaaaaacccaatctgattttaaaatgggcaaagaataccacctcacacccattaagatggtcactatcaggaaaaaaaaaaaaaaagaacagaaaataacaagtgttgtcaaagatgcacccttgcgcattgctaatgggaatgtaaaatggtacagctgctaaagaaaacagtatagcaggccctcaaaaattaaacgtagaggccaggtgcagtggctcacgcctgtaatcccagtgctttgggaggctgaggtgggcggatcacttgaggtcaggagttcaaggccagccaggccaacatggcaaaacctcatttctactaaaaataacaaaaattagcctggtgtggtggcacatgcctgtaatctcagctattcaggaagctgaggcacaagaatcacttgaacctgggaggtggaggttgcagtgagctgagaccatgccattgcactctagcctgggcgacaaagcaagactccatctcaaaataataataataataataattaaacatagaatcaccatgtaatccagcagttttaattctgggtatatgcccaaaggaattgaaagcaggatctcaaacaaatatttgtacagccacattcataatattattcatcacagccaaaagatgaaaacaacacaagtgcccactgatggacgaatggataaatacaatgtggtacatacacacagtgaaatactaatttttgttttgagacagggtctcactctgtcgcccaggctggagtacagtggcacgaacaaggctcactgcagcctcaacctcctgtgctcaagcaatcctaccacctcagcgtcctgagtaggtggcacacctataggcacgtgccaccatacccagctaattttttaatttttttgtagagttggggtctccctatgttgcctcggttggtctccttccacctctgcctcccaaagtgctggattacaggtgtgagccatcatatctggccttaagtcttaaaaaggaagaaaattctgacacatgctaccacaaggatgaaccttgaggacattaggttagtaaaataaagcagataagcagacagaaaagtacacatactgtatgactccacttatatgaggttcctacaggagtcaaatttatacagagagtagaagggtgattgccaggggctggggtaggagagaatgggaagttgttatttaatggacatagttttaattttgcaagatgaaaagagttctagagatcagctggcaaaataggtcaaatgtactttactgacctgtatacttaaaaactcttagatgggaaattttctattacacatattttaccgcagtttacaaaattaaaacatttgaagctgggtgcggtgcctcacgcctgtaatcccagaacttcgggaggccaaggtgggcggatcacctgacatcaggagttgaagaccagcctggccaacatggtgaaaccccgtctctactaaaaatacaaaaaaaaattagccgtcatggtggcgcgtgcctgtaatcccagctatttgggaggctgaggcaggagaatcacttcaacctgggaggcagaggttgcagtgagccgagatcatgccactgtactccagcccgggagacatactgagactcagtctcaaaaaaaaaaaaaaaaaaaatttaaacaccaaccatgcaaagactgatcaaaataaagtaggctttagggcaagcagcattactagaaataaggaaagacactgggtaacgttaatattctcaattcgccaagaagatataacaattctaagtttgtgtgttgctgataaacataggctcaaaatatataaagcaaaaaatagtccgaattccaaggagacaaatctatgattatagcagaagttatgtctgtcagtaactgttaaaagaagcatatgcaaaattagtaagcaatagatctgaaccactggataagcaaactttaaccaaatggacatatatagaatagtgcacccacaactgcagatcccagattcttttcaagtatacatggaatgtttatgaaatgctcggcaatatagcaagttccaacaaatttcaagtgatgtaaatcatacagagtacattctcagacaatgatgcaattaagctggaaaataagaattttaaaaattaggaaatatctacatgttcagaaactatacatatacttgtaaataactcacattttttaaaaagatcacaatgggaattagaaaatattttaaactgatagttcataaaaatattacatcctcaaaaatgagatgcagctaaagccatacttcaatggaaggtttttaattaaagtatttttaatgcctgtattagaaaataagagagactgaaataagaataaacaaagtactcttgttgagaaattagaaaaaacatctaattaagcacaaagaaatgaaaacataggctaaagttaattctttgagaagcccaataaaattaagcccctggtaagtctattttttttttctttatggagatggaatctctctgtgtcgcccaggctggggtgcagtggcacaatcttggctccctgcaacctctgccttccaggttcaggcgattctcctgactcagcctcccgagtagctgggactacaggcacgtgccaacacatctggctaattttttgtatttttagtagagatggggtttcttttttttctctctttttttttttttttttttttttgagaaggagtctcgctgtgtcccccaggttggagtgtagtggcgcgatctcagctcactgcaagctccacctcccgggttcacgccattctcctgcctcagcctcccaagtagctgggactacaggtgcccgccaacacgcccggctaattttttgtatttttagtagaaatggggtttcaccgtgttagccaggatggtctcgattttctgacctcatgatccgcccatctcggcctcccaaagtgctgggattacaggcgtgagccaccgcgcccggctagacggggtttcaccatgttagccaggatggtcttgatctcctgacgtcgtgttccgcccgcttcggcctctcaaagtgctggtactggcgtgagccaccgtacctggcttttttttttttttttttgacacagtttcactgtgttgcccaggctggaatgcagtggtgcgatcttggctcactgcagcctccgcctcccaggttcaagtgattctcatgcctcagcttcccaagtagctgggattacaggcgtgtgccactatgcccagctaatttttggtgaaatcccgtctctgctaaacatacaaaaaattagctgggcgtggtggtgcatgccagtggtcccagctacggcggaggctgaggcacaagaattgcttgaatccgggaggcagaggttgcattaagcagagatcactcccctgcactccagccaggggcaaaagagtgagactttgtctccaaaaaaaagaagaaagacacctaacctctacaaagaaaaattaattccaggtgggttgtagatttaaatatgtaagaaaaaaatataaagctcctaaaacagtacaaatcaagagaaaatgaaagtattctatgatctgtgctttaatacaggcaactgaggaattttttaatttttttttaaagacagagtcttgctctgttgccaggctggagtgcagtggcgcaatctcggctcactgcgacctccaccacccgggttcaagcgattctcctgcctcagcctcctgagtagctgggactacaagcacacgccaccatgcccagctaatttttgtgtttttagtagagacggggtttcaccatgttggccaggatggtctcgatctcttgacctcgtgatccgcccccccccccccatccccctgccatggcctcccaaagtgctgggattacaggcgtgcaccactgcacctggcttttgtttcattttaattcatttctgtttaagtagtcacagatggccaccatattgggtaccacagaactaggagataatattaaaatatctttgtgacctgaaggtaggaaagaattattaaacaggacacaaaaatcaataaccaaaaagaagaaaaaaattaagaagtttgactgcattaaaattaagaaattgtgtacactacaaaacattaaaagagtgcaatgtcatgtcacaagtggaaaaggatatttacagcatgaataacaaaggactgagatctagaatatataaaggattcttacatatcaataaggaaaaaaaagaacccaaaagaaaaccagataaaagccattaacaggcaatgcaccagaaaagatatccaaatgaccgataaaggtgtttgaaactgctcaacctcactcataagcaaataaatacaaattaaaatcgtgatgagatagcagcacacacccagcagaagggcttaaattaaaaaggctgacaatacagagagatggttaggatgtagggcaatggaatctcaaatacagctgggtcaagtttggattggtataaccactttggaaaactgtttggcagtatctactgacgttgaacatcctctgtaacccagcaatttcactccaggaaatatatgaacttgtacctcaaaagacatgagtatttgtattagaatattctataagtatttgtagcagtatgaatcataatagccaaaagttgggggcagacccagatgtacctcagcagtggaatgagcaaacttctacattcatactgtgaattaccccacagcaggcaaggaatagtggctcaggcctgtaatcccagcactttgggaggcctagatgggccaatcacttgaggccaggggttcaagcccagcgtggccaacatggcaaaaccccatctctacacaaaaattagccaggcatggtggcgcacaccatgctaatcccagctactcaggaagctgacacagcagaattgcttgaacccaggaggtggaggctgcaatgatctgagatcacaccactgcactccagcctggacaacagagcaagaccccgtctcaaaaaacaaaaggcaaacaaaattaaactacagcattgacagacacatgcttagcaaggagacaattgccataaaatttaggactgtggttgcctctaaaaggaggtgggaagcatgagtgagggttcgagttgctcatgatggtacatgtcttgacctgatgttctgtgacatggctctttgctgtgtgataaaacaatgagctatctctgtttcatacacttttctgtagtgtgttatatttcacaataagaaaaggctaaaagaaaacagactggcacggtggctcacacctgtaatcccagcactttgggaggccgaggcagatggatcatgaggtcaggagttgaagaccagcctggccaaggtgatgaaaccctgtctctactaaaaatgcaaaaattagccgggcgtgttggcgggcacctgtaatcccagctacccgagaggctgaggcagagaattgcttgaaccccggaggcagaggttgcagtgagccaagatctcaccactgcactccagcctgggtgacagcgagactccatctcaataaataaataaataaataaataaataaataaataaatattcagctgggcgcggtggttcacgcccgtaaccccagcactttgggaggccaacgcggggttggccaaggttaggagatcaagaacatcctgactaacaccactgaaacccatctctactaaaaatacaaaaaactagctgggcatggtggcacgtgcctgtagtcccagctactcgggaggctgaggcaggagaatagcttcaacccaggaggcagaggttgcagtgagctgagatcaaacaactgcacttcagcctaggtgacagagcaagactctgtctcaaaaaaaaaaaaaaaaataaaaatttaaaactcagtggatatgtttgacaaaaaagcagctctgtatttttctccttcctaatgaaagcaggaacctttctaaaaggaagtagtagaagtttgcagcatttctggcctcccaaacatatccagtggctgtttctggcttctcagttcacttttgaatcccctacttttccttctctctcctagtcagatgtgttctgtgtgtgtgtgtgtgtgtgtgcatgagtgtgtgaatgcatgagtgtgtgaatgcatgtatgtgtgaacgtgtatttgtgtgtggatgagtgtgtgtgaatgtttacgtctgtgtgtttgcgtgtgtttgtgaacatgtatgtgctaacgtgcttgtgtttgtgaacatgagagtatgtgagactgtgtgtgtgtgtgtgaatgagtgtgtatgtgtgtgtgcgcacaggcgcctgtgtggctcagccttggcccttggctctctggcttctgcaggctctcccacggagcaccctctgctgactctgcagccccgcaggccttcctcgaacagtccatgacaggaagccaggcttcctggggtcctgagtcagcagagcaggaaggaaacaaaggcctcagaaccgcagaagagaaagaaggcagcctgaagacagaaggcgaccctctgaagacaggtctagagacttaacgtatgatgttcctggagtcctgttgcctgtaagggaagcacaaaccctgagttgcactgtgtcctctgacctgtctgatcccaggcaagctcctcggcctctctctgctacagtttctttgcctgtgaaacagggataataaaatagcctttccatgggctgagcacggtggttcacacctgtaatcccagcactttgggaggccaaggcgggtggatcacgaggtcaggagttcaagaccatcctggccaacacagtgaaaccccgtctgtattaaaaatacaaaaactagctgtgcatggtggtgcgtgcctgtagtgccagctactcaagaggctgaggcaggagaattgcttgaacccgggaggtagaggttgcagtgagccgagatcgcgccactgcactccagcctgagcaacagagtgaggcttcgtcccaaaaaaaaaaaaaaaaaaaaaaaaaacaatagcctttccagggactgtgggattacaggcttctcaaacctcagcttggatagagtaagtctacagaagattagctcttactacttcaacggttttaaaacagggaatgttaaatacccacttattttcttcctgccttttagctcccacgtttcaattgaaactaatatcgaacaagcaaacaaaacaaatcagaaaccccctggtagccagggtttggcatttgtgattaatctacaggagatcagtactaaaataggatattatgtctgaggacattttcatcctaggtcctactgcaactcgaatggcacttaggctccacaagaccaacttcctatttctacatcagtgaaggttcggagtggagcttttcattcagcaaagacagcaggaagcacagggttcggtgatgaattctcacgtggtgagcgtggtctccagaggtgttaagatgttgtgggaaagcagaaagcaccaggtttagaggtgacttagaccttggtccacgagacctttggctaactactgaatctggcccttcttatccatcaaagggaaacactggactacatggtctaaatttccttcacctcaataagtaagggtttcactcttctaacaaaagaaagaaagagggtcaggtgcagtggctcacacctgcaatcctagcactttgggaggacgaggcaggcgatcacctgaggtcaggagttcaagaccagcctggccaacatggtgaaaccccatctctactaaaaatacacaaattagctgagcgtggtggcgggtgcctgtagtcacagctactcgggaggctgaagcaggagaatggcttgaacccaggaggcgaaggttgcagtgagccaagatcacaccactgcactccagcctgggtgacagagcaagactccctctcaaaaaaagagagagggaaggaggggtagagggaaggaggggtagagggagggagggagggaaagagagaaaaagaaggaaagagagaggccaggcatggtggcgcacacctgtaatcccagcacttcgggaggccgaggcaggtggatcacaaggtcaggagttcgggaccagcatggccactatggtgaaaccccatctctactaaaaatacaaaaaaacaaattagccgggcgtgatggcgcatgcctgtaatcccaactactcgggaggctgaagcaggagaattgcttgaacccaggaggcagaggttgcagtgagccgagatcgcgccactgcactccatcctgagggacagagcgagactctgtctcaaaaaaaaaaaaaagaaaagaaaagaaaaaaggaggagggagagaagaaaggagagcgagtgatgaagattttggctaagaaccagctatgaagaaaaaaaaaaaagtatcccctaaagtctttcttcttacaaaacaaagtgtgttttaattataagtcaaatttcactttaaaggaagaaaataacccttaggcattttctgttctagttaatttaactttaatttttgtctccagcaggtacctcttcagtagaaaaattcaataaggtttctgacactttctacctatgggccagttacatacagaagagaaaactgaaactgaaaactggtttgtcatttttacagaaagtcactgcaaagaaggagaattccaagtgcaaatgacttgagtacgtaattcttttgtgccatttctgttactatagggttaatccagtatgaagaaagtgacaaagggcagcatttatttttatggattccacattataaccaagtacttggcaacctgccctctcatatgttgcgaaacaaaaatgttgctttcagtgtgtttttaataggccaagcagtttgtttgatcacagtggtcgggtatacactcagagacgccagaacattctcattgcgttttcactgctttggttaacatcttggtctcctgtccgcactctaaagaaccatttgaggactcaggggagtcatgtcctgggagtgactatgggtcctaggccacagcccccactctctcagcctaaaccactcaaaggcactcagatccggatttgcaaaatattttgcaaaacttgcaaaaaccccaccagttttagattttgaaattgttggcacaggcaaccgtctacaatcatgaaattctcatgagtgaggtggaacagatttctgtaaacaaagcaaactccagtctctccagcctgctgtagaaatatttatacccggccgggtgcagtggctcacacctgtgatctcagcactttgggaggccgaggcgggtggatcacctgaggtcaggcgttcgagaccagcctggccaacatggtgaaaccccaccagtactaaaaatacaaaaattggccaggcgcggtggctcacgcctgtaatcccagcactttgggaggccaaggcaggtggatcacctgaggtcaggagtttgagaccagcctggccaacatggcaaaaacccacctctactaaaaatacaaaattagctgagcatggtgacagatgcctgtaatcccagctactcgggaggctgaggcaggagaattgcttgaacccgatagacggaggtttcagtgagccgagatcacgccactgcactccagcctgggcgacagtgagaccccatctcaaaaaaaaaaaaaaaaaaaaaaaaaaaaaaaaagtcaggtgcggtggctcatgcctataatcccagcactttgggaggccaaggtaggtggataacctgaggtcgggagttcaagaccagcctgaccaacatggagaaactccatctctactaaaactacaaaattagccaggcatggtggcacatgcctgtaatcccagctactcgggaggctgaggcaggaaaattggttgaacctgggaggtggaggttgcagtgagctgagatcgcaccattgcactccagcctgggcaaacaagagcgaaactctgtctctaaaaaagaaaagtacaaaaagtagttgggtgtggtggtgtgcacctgtaatctcagctatttgggagactgaggcatgagaatagcttgaacccaggaagcagaggttgcagtgagccaagattgcaccagtgcactccagcctgggcgacagagcaaggatctgtctcaaaaaaaaaaaaaaaaaaaaccagaaaagaaaaagaaatatttatacccaaagaaaagggtcccttccagctcaaggatgtgttaatgtaattttttttttaactataaatgaagtgctttgagcaaacctcagaaccttcaggtgcacattttaccctaactcatctctttgccccataggcttgacggaaaggtaaaaatatccctatgattctcttcacaagaaggtagccaagtatttattggatgcaagacagtttgtttaaggagcctaaaaaagcaaagatgcagcggtgagaaagaacaagatcatgacctttgcaggaacatggatggagctggaggccattatccttagcaaactaacacaggaacagaaaaccaagtaccgcatgttctcacttaaaagtgggagctacatgatgagaacacacagacacatagaagggaacagcacacactggggactttcggagggtggagggtgggaggaaggagaggattgggaaaaataactaatggctactaggcttaaaacttgggggacaaaataatatgtacaacaaaaccccatgacacaagtttacctagtaacaaacctgcacttgtaccccagaacttaaaagttaaaaaaaaatctattgactcaaaagcctggtaagcagctttcactgttttcaccaaacctcatcagacccaaaacaatagaccttccattgtcttgaccaaaggtaaagatccgcctcacaagaaaggagccagctgtttattgcacgtaaggcagttttttaaagaactcctttaaaaaacaatctgttgactcaaaagcctcgtgaccagctttcacagtattcaccagacctcgtcagagccacaataaactttcccataatagcttcggtgtcccagaagacagcagcaaagctatgggttgatttatcagtcattattaacatacgtatctgcacacagttggatttcttttaaatggggcctaatttttttttctgacccttgtaccatgtttgcccacctgattttgttatctaaaggctttatgtgaagtcaggagagtttccaacactaagatgataggaagtggatgatggttctttacaccaaataaagctaccctcactggaattcttacaaagtgagaggccacagttccagggaccaaagagccagcatcaagcagggcagagcagggctgaaattgagcctcctgttattcccattctatccctcactgggtcctctatttctttcttcctgttttttgtttgtttgtttgtttgtttgtttgttttttgtgacagtctccctctgtcgcccaggctgcagtgcattagtgtgatcttggctcactgcaacctccgcctcccaggttcaagcaattctcccacctcagcctcccaagtagctgggactacaggcgtgcaccaccatgcccagctaatttttgtatttttagtatagatggggtttcaccatgttgtccaggctggtctcaaactcctgacctcaggtgatccgcccaccttggcctcccaaagtactgggactacaggcgtgaaccaccacgcccggccactttcttccttgtctcttacttatcctgttttccttctcttccctctctccctattcagctacagttttttttgtttttgtttttgtttttaatgagacagggtctaactctgttgcccaggctggagtgcagtggtgtgatgtcagctcactgcaccttccacctcccagtctcaagcaatcctcctgcctcagcttcctgagtagctgggactaggcgcatgccaccacacccagttgatttttgtattttttgtagagacagggttttgccatgttgcccaggacgttcttgaactctgggctcaggcgatcctcccgcctcagcctcccaaagtacctggattacaggcatgaaccacctcacccagctcttctaaagtcttaatcacttactgaattacagctcttacccagaactctcacctgtcttttgttactaccttccagggcatctttagggttgttcccattttcttctctttgaaaacatctcctgtctctgatcacatgtcctagaccacccacctccaaatctcctttatgccaccaggtgatctcaatactgtcacttcagtcataattgcaagatttttcttactgattccttttatcttgcgttggaacacaggtttgttacacaccccaatatccattctctccctccttgattttcagatggaacatggctgctcagactacaattcacagcctctcttgcagttagaaattgtcctggaacaggctgggcacagtggctcacaccagtaatcctagcactttgggaggctgaggcaggcagatcacctgaggtcaggagttcaagaccagcctgaccaacatggagaaatgccatctctactaaaaatacaaaattagcctagcgtggtggcacatgcctgtaatcccggctactccggaggctgaggcaggataatcgcttgaacttgggaggtggaggttgcagtgagccaaagatcgcaccattgcactccagcctgggcaacaaggaagcaaaactctgtctcaaaaacaaagacaaaagaaaaagaaattgtcctggaacaaagagttgcaatcaaaattattgtgtgcattgtccagaaaatgtcctttaaaaagggttataggcactcttttttgctccatcctatttcctgctgggtagaatatggatgtgcagcctggagcttgagcaaccagcttggatcatgaggccgtgtgctaagcacatcagagcattaaaactagaggtgtcagctgggtgtggtggctcacgcctgtaatcccagcactttgggaggccaaggtgggtggatcacctgaggtcaggagtttgagaccaccctggccaacgtggtgaaacgctgtctctactaaaaatacaaaaaattaactgggcatggtggtacgcgcctgtagtcccagctacttgggaggctgaggcaggagaatcgcttgaacccgggagacagaggctgcagtgagctgagatcgcaccattgcactctagcctgggcaacaaaagcaagactccttctcaaaaaaaaaaaactagaggtgtcggggacagtggctcacacctataatcccagcactttggaaggctgaggcaggcaggtcacttgaggccaggagttcaataccagcatggccaacatagtgaaaccccatctctactaaaaaataataataatacaaaatacaaaaattagccaggggggttggcacacacctgtaatcccagctagtggggaggcaaaggtgggaggatcacttgagcctgggaggtggaggttgcagtgagccaagatcacgctactgcactccagccttggcaacagagcaagactctgtctctaaaaacaagaagaaaattagaggcgtcttgagtctctgatgattaggggaccccataccagccctggaatgaccatctgaattctgttatttgagtgagaaactaaacttctatcacatttaagcctttttttttttttttttttttttttgagacagagtctcactcttgcccaggccggagtgcagtggcacggtctcagctcactgcaatctctgtctccagggttcaagggattctcctgcctcagcctcccaggtagctgggattacaggcacctgccaccacgcccagctaattttttttgtaattttagtagagatggggtttcaccatgttgcccaagctggtctcaaactccttacctcatgatccacccaccttggcctcccaaagcactaggattacagtcatgagtcactgcacccagcctccgcactattatttttttaaatgtatgtagccagatatacattctaacatatggaatttataaagtcatgttgcatataaatctaatttacctagacccatgcaaaagtcattaggcccagggtgggccttgcagagagaacagataaagggtagggaattctactgactcaaaacccttctgaccggctttcacgggcttaccagattcccctagtgccacagaaaacatctcataatagctttagtgtccagaggcagaagatattataatattttgtaacttttttgcataattgtactattcttgcaagaacttgcaagaatagtagagggagttcccatacaaccttcacccacattccccaaatgttaacattttatcacatttgctttatcattctcactatatctatatttttttctgaaacatttgagagtaagctgcagaaacactgcccctttacctccaaacacttttttttttcttgagatagggtcttgctctgttgcccaggcttgagtataatggtgtgatcatggctcactgcagcctcaacctcctgggcccccacaattttcccacctcagcctcccaagaagctgggagtacgggtgtgtgcaaccacacccaggtaagttttgttttttgtgtgtttttttttgcatagaagaagtctcactatattgccctagctggtctcgagctcccgagctctcaaactcctgccttgacttcccaaagcactgggattataggcatgagccaccacacccagcctctaaacactttgcatgtgtttcctaaaaacaaggaattatgtgggaacataaccacagtaagacgattaaaatcagaaaattcaccttcatacaatactattagctaacctcgcccggcctagccttgacatttttgaggagtcggttctgcagaatgtccctcagtttgggaacatctgttgcttttctcaggactagattcagtttgtgcatttgtggcaggaataccccggaagtgatgctgtgctattcttagtgcatcatagcaggagacctatgatgtcagtgtgttactggggatgttaattttgatcattggttgagatggtgtccaccagctgtcttcacagcaaagttagtattttctctttgtaaaataagtattatgtagccgggcacagtggcttaggcctgtaattccagcactttgggaggccaaggcgggcagatcacctgaggtcaggagttggagaccaccttggccaacatagtgaaaccccatctctactaaaaaatacaaaaattagcatggcgtggtggctggtgcctgtaatcccagtgactcaggaggccgaggtgggaaactcatttgaacccaggaggcagaggttgcagtgagcagagatggtgccgttgcattccagccgggcgacaagagcgaaactccttctcaaaaaataaaatataataagtattatgtgtgaagcactttgagactgtgtcaataactgtgtaatcctccaactttcattcaaacctcttagcatttattgatgattctctctctttttttttttttttttgtggggggctactgagtcttgttctgtcgcccaggctggagtgcaatggcgggatctccgctcactgcaagctccgcctcctgggttcacaccattctcctgcctcagcctcccgagtagctgggaccacaggtgcccgccaccacgcccggctaatttttttgtatttttagtagagacagggtttcaccatgttagccaggatggtctcgatatcctgacctcgtgatccgcccgccttggcctcccaaagtgctgggattacaggcgtgagccaccgtgcccggcctaatgattcttgcataaatcaattattactacgatgattggccaatagtgatattgtaacacttttattttcttttccaaggaggattgtaaattagaatgacatgaaaacaaaaacccaaggacatggtgcttatctccatgaacagtatataaataaaaataatttaccaattaagaaatctcgtcttggccttgtgcagtggctcacgcctgtaatcccagcactttgggaggccgaggcgggcggatcacaaggtcaggagttcgagaccagcctggccaatatgatgaaacctcgtctctactaaaaatacaaaaaattagctgggcgtggtggcaggcgtctgtattcccagttacttgggaagctgaggcaggagaatcgcttgaacccaggagacggagcttgcagtgagctgagatcgcaccactgcactccagcctgggcgacagagcaagactctgtctcaaaataaataaataaataagaaaagaaaaaagaaatctctttttgaacacagagcatgtgtctggagttgtgccagaccttaagattcaaaagtaaatgagtccatgggcctaccactgtgaacacgcctgatctcatctgatctcagaagttaacccgggtcaggcctggttagtacttggatgagaggccaacagggaataccacatgctgtaaccttaaaaaaaaaaaaaaaaaaagagagtaaatgagatatcccagttctcagggagcacagttgtttaataggggacatgtgaataaatacaacacagtaagtgctacttctagaaccaggctccttgtatggtagggtctagggctcctctatggagtggtgtaagatgacacactttctttgtcatccagctatttgcatacactgagaaagatgttgctttctgggaggcaaaaacttcaacactatctattattgatgtatctgaggatcttgggtgcccaggcaagagcaagattgccagaaaggactatagaagccttaagaaagatctcactttaaagaaaggaagaattggctgggtggggcagctatcctagcctatgaccttcatagtcctggcttgtggaagtctcacctgatatcctgtcaaacatgaaatatgcccacatctcatactatattaatctatgtgtatatatattagttttatatgagatgagtttgcttgtttttttgagatggagtctcactctgttgcccgggtctggagcagtggcttgaccttggctcactgcaacctctgcctcctgggttcaggcgattctcctgcctcagcctcccgagtagctgggattacagttgcccaccaccacgcccagctaatttttgtatttttattagagacggggtttcaccatgttggccaggctggtctcaaactcctgacctcaggtgatccacctgccttggcctcccaaagtactgggattacaggcatgagtcaccacactcagccaaattttatatgagatgagttttatcagttggttgacataccattataatttgttagcattttattaattttaattgttaagtttttatagtttaaaacaaatacatattggccaggtgcagtggctcatgcctataaaacccgcactttgggaggccgaggcaggagatcacctgaggtcaggagttcaagaccagcctggccaacatggtgaaacctcatctctactaaaaatacaaaaattagccgggcgtggtggcaggtgcctgtaatcccagctactcgggaggctgaggcaagagaattgcttgaaccagcgaggcggaggtagcagtcagctgagatcgccccattgtactccagcctgggtgacaagaacgagacgacttctcaaaaacacaaacaaacaacaaaaaaaatacattttcttaggtctccaaccagaaacctttttgtaggcttttacgtagctcataggcattagcaagcatgcctgacatggctaataagttttgttaagttgaaagaagtttcgtttactttatcaaatatccttgagctagtaaaattttattatttttgtttgtttgttttttgagacggagcccactctgtagcccaggctggagtgcagtggtgcgatctcagctcactgcaaccttctccctccgggttccagagattctcctgcctcagcatcctgagtagctgggactataggcgtacaccaccacactcggctaattttttttgtatttttggtagagacggggtttcaccatgttggccgggatggtctcaatctcctgacctcatgatccacccacctcggcctcccaaagtgctgggattacaggtgtgagccaccccgcctggccagatttagttcttttttttttttaaataaataaataaataaataaataaataaataaataaatccatcttgtgtttgtttttgtttttgagacagagtcttactctgttgcccaggctggagtaaagtggcataatcatagctcactgcagcctgaagctcctggcctcagatgatcctcctacctcagcctccctagtagctaggtctacaggtgtgtgccaccacgcccagctaattttttgtattttttgtagagaggaggttaggaggtttcaccatgttacctaggctggaaccctttttttttttttttttttgagatgtagtcttgctctgttgcccaggctggagtgcagtagcatgatcctggctcactgcaacctccaccttctgggttcaagcaattcttctgcctcagcctcccgagtagctgggactacaggcttgcgctaccacacccggctaatttttgtatttttagcagagatggaggtttcaccattttggccagtctggtctcgaactcctgacctcgtgatctgcccacctcagcctcccaaagtgatggaattacaggcatgaggcaccgtgcccggccagaacccacctttttattgagatataatttatataccacaagattttcccatttaaagtgcacaactgaatggtcttcagtacaaagaattgtgcaaccatcaccactatctaattttagaacatttcatcgcttcaggaaggaactttatgcccatttaaagtctctccccatccttcctccagcccctgacacccactagtctactttttgtctctatggattagccttttatcgacattttatctaaatggaatcatacaatatgtggtcttttgagatttctttcaacttagcctaatgttttgaggttcatccatgttgtagcatgtatcagtgctccattcttttttttgagacaagagttccagtctgttacccaggcttgagtgcagtggcaagattgactcactgcaacctccacctcctgggctcagacgattctcctgcctcagcctcccgagtagctgggattacaggcatgtgccaacacgtccagctaatgttgtatttttagtagagacggggttttaccatgttggccaggctggtattgaactcctggcctcaagtgatccacctgcctcggcctcccaaagtgctaggattacatgtgtgagccactgcacctagccagaagctggaattttagatcaaagatcatagataggccaggtgaagtggctcatgcctgtaatcccaacactttgggaggccgtggcaggaggatcacttgaggccaggagttcaagaccagcctgggcaacacaaggagaccctgtctctacaaattagctgaatatggtggcatatggctgtggttccagctacttgggaggctgagaggtgggaggatcgcttgagcctgggaggtcaaggctgcagtgagccattatcatgccactgcaatccagcctgggcaacagagcaagaccctgtttcaaaaaaaaaaaaaaaaaagatcttgcactgcatggcatctgcacccagcagtttactcttgctaaggtgttcaaaggtcagtgctatagaaattcagtatctggcatcattggttttcttgactttgtgcttgttaaacctagtatttctattgatacagtatttgtatagatttcacagagtgcttagtttgatatactctataacagtaagcaatgcctttcttcttccagggtgttgaattgagaaccaggcagatccaccacctacagtaaagatgaccctaaagtgaattggttgaagaaattagatcccaaagattcttggtgaattttcaagtcttcatcagtatatccatattaaaaggagatgacagaagccaaaataaaagaattatgggctgacgggacaactggattaaaataagcatcagtttcgttaaaaagggctaacttgaagataaatcttttgactccagctctttagaggatctaaagtgaccctgatggacagtggaaaaaatcacaacatggaatcccttggataaaaatctattgactttgaataattttgcctaatgttacataatacacaattaaaaaaaaaaaaaaccttggccaggcatggtggctcacacctgtaatcccagcactttgggaggccgaggtgggcagatcacaaagtcaagagatcgagaccatcctggccaatatggtgaaaccctgtctgtactaaaaataacttacctgggcatggtggcactcgcctgtagtcccagctactcgggaggctgaggcaggagagtggcgtgaacccaggaggcggaggttgcagtgagccgagattgcaccactgcactccagcctgggcgaaaagagtgagactccgtctaaaaaaaaaagattatagataggccaaagccaaaaccaggggtgcaaaagggaaataaatcaggagccaagtaccaagtgtcaggatcaggatccagaaaggcaggatacagcagagacactaaaaccaggaccatggtaaaagtgagacactggagaaagaaaccaaagagaacactgtaaccgggagcctagctaatcttgcagttggattgagaggcaaactgggtgatttttccactggctgaccttttagaagttccagacatgttctcccaaaggcactaagttctgggtcccagagaagtgggctcatggcacggctgatctcagagttggtgcttgtgcagctcctgacacaaggtgcccctctaaatgaagagccaaggagcacacgtttatcgaaggtctactttgcgccccttgtggcaacactcatacttggaggcagaggctaccatcagaatataaattttatcctcaggaagatgagaagacaactggcttagaaactagcttagaacatttccaagtttgacacagggccaggggctgtcaagcctcaaccacaatgcaatcaaccaccagctctattccacaggcgcatgtccaggtcggctaataaatggaaaagccaggattaagattcaagtttcgtccggtcacggtggctcactcctgtaatcccagcaccttgggaggccaaggcgggcagatcatgaggtcaagaaatcgagatcatcctggccaacatggtgaaaccccgtctctactaaaaatataaaaattagctgggcacagtggtgcacgcctgtaatcccagctacttgggaggcagaagcaggagaatcgcttgaacctgggaggtggaggttgcagtgagccgagatctcgccactgcacttcagtctgggtgacagaatgagactccgtctcaaaaaaaaaaaaaaaaaagattcaagtttcttagcctgggcaacaacgacgacaaaaaattcggagcttatggtggtgcaggcctgtagtcctagctactcagcaggctgtggcagggggtgtcacttggaggctgcagtgagctatgattgcaccactgcactccagcctgggccacagagcaagattccgtttcagaaaaaaaataaataaatttgggccggtctcggtggctcacgcctgtaatcccagcactttgggagactgaggccggtggatcacctgagatcgggagttcgaggccagtctgaccaacatggagaaatccccgtctctactaaaaatacaaaattagctaggtgtggtggcgtatgcctgtagtcccagctactcaagaggctgaggcttgaacccgggaggcagaggttgcggtgagccaaaatcgcgccattgcactccagcctgggcaacaagagcgaaactccgtctcaaaaaaataaaataaataaaataaataaattttatcaatcatggtggtgttttttgttgttgttgttgctgtttgacagggtcttaaaaataaataatttaagtaaataaaaataaataatttcctgattttccagcttgcagatagcatattgagtaagccagctcccctaacaaaccttctatggctctctaaatatatcgtattggttctgtttctctggagaactctgactaaatacatcggtctagaacctaactctattctgcatataagcactgagtattgtagcacattgtttattttactttattttatttttatttatttatttatttatttatttatttatttatttatttatttttgagatggagtgcagtagtgtgatcagcaatcctcccaagtagttgggaccactggtacacaccaccacacctggctaattttttcttgtattttttgtagagatggggttttgccatgttgctccagctggtctgaaactcctgggctcaagggatccacctgccttggcctcccaaagtgcagggattacaggcaaaagacatggcaccgggcctcatgtaggtgtttataatgatctcggttgtgatggttaattttatgtgtcagctggactggcttgagggatgcccagatagctagtaaaacagtatttctgggtgtctctgggaggtgtctctggaagagatgaacatttgactcagtagaccaagaaaagaagatccagcttcaacgaacgtggcggtgtgtgggggcattatctaatatatacagggccctgaataaaacaaaagggtcaaggatgtgagaatcctctcttcttcaactaggacattcatcattctcctgcccttggacatcgtagctcctggttcctggttcttagacctttggccttggactgggactgaattacaccacgagctttcctgattttccagcttgcagatagcatatttagtgagccagctcccctaataaaccttctatggctctctaaatatatcctattggttctgtttctctggagaactctgactaaatatatcagtctagaacctaactctactctgcatataagcattgagtattgtagcacattttttattttactttattttttatttatttatttatttttgagatggagtcttgctctgtcacccaggctggagtgcagtggcacgatatcagcttactacaacctctgtctcctgggttcgagcgattctcctgcctcaactcctgagtagctgggactacaggtgcacgccaccacgcccagctaatttttgtaattttagtagagacagagtttcaccatattggtcaggctggtctcgaactcctgacctcaggtgatccacccaccttggcctctcaaagtgctgggattacagacatcagccaccacgcccagacttattttattttatttatgtatttatttgagacagggtcttgctctgttgcccagggtggagtgcagtggtgcacctcggctcactgcaacctccgcctcccaggttcaagtgattctcctgcctcagcctccagagtaactgggactacaggcgtgctccaccacaccaggctaaatttttatatttttagtagagacggggtttcaccatattggccaggttggtctccaactcctgacctcgtgatctgcctgcctgggccccccaaagtgctgggattacaggtgtgagccaccgcacccagccttattttattttatttatgtatttatttgagacagggtttcactctgttacccaggctggagtgcagcggtgcaatcatggttcactgcaacctctagcttccaagctcaagtgatcctcccacctcagcctcctaagtagctgggactgtaggcatgtgccaccacacccagctaatttttttttttttgagagggagtcttgctctgttgcccaggctggagtgcagtggcacaatctcggctcattgcaacctctgcctcccaggttcaagcaattctccttcctcagcctcccaaacagctgggatgacaaggatgtgccaacacgcccagctaatttctgtatttttagtagagacggggtttcaccatgttggccaggctggtcttgaactcctgacatcaggtgatctgcccacctcagtctccgaaagtgctgagattacaggcgtgtgccagtgcacccagccagacccagataatttttgtattatttgtagagatggagtttctctctttctctttttttttatttttacctttcacctttttattggcctcctgctcctcaaagtgtaccctgtttcttctggcttaatgtctcagaactttggtgtcgttggtctcacacacctctttaccatccactatctggggggtggtggtcttatggatggtttgcatggagttgctgctgtccagggcatcacaaagattgaagtcctcgtcgtcgtctagcaggtggcgataggtggcgatctcagcctcctgattgaccttgatgtttagcaaggacccgttctcctggtcctggcgctgcccctctgcctgggagatggagttttacaatgttgcccagggtgatctcgaaatcctgatctcaagtgatccacctgcctcagcctcccaaagtgttgggattacaggcgtgagccaccatgcccagctgcacttttttttttttttttttttgagatagtttctctcttgttgcccaggctggagtgcaatggctcaatcttggttcactgcagcctccatctgcccagttcaagcgattctcctgcctcatcctcccaagtagctggaactacaggtgtgcgccaccacgcccagctaatttttgtatttttagtagagacaggtttcaccatgttggccaggatggtctcgatctcttgacctcgtgatctgcctgccttggcctcccaaagtgctgggattacacgtgtgagccaccgcgcctggccccagctaattttttgtatttttagtagagacggggttttgccatgttggccaggctggtctcgaactcctggcctcaggtgatccacccaccttggcctcccaaagggctggtattacaggcgtgagccaccactcccagccccagccacccattttaaataatcgtgaaagttttagggattcgactatcatataaattctgtgcttcgttttgtgcagggccctcccaaaagttatttcctcttttggaaaggatgtcactactggccacagtacccctggtatttaagtcaatgatgttgtccacccatcccagtctgtctttgtagtgtgccagttgggatgactccatagctacgcacaggcatctggttacttccttatgtcttctagtgtagccatgcccaagcatttacatattgaaattttgtatcttatttaccttattttattataaattaaatgccatttatttctcctttatattaggtcattgtattgtggagtttcatttttggaattatgtgcataagtgggttattttctatattaatttctttttttatcttcaacttttaagttctggggtgcatgtgcaggatgtttaggtttgttacataggtaaacatgtgctacgctggtttgctgcacagatcatcccatcgtctgggtattaagcccagcatccattaactgttcttcctgatgctctccctcccccctcaacctccccgctcccatgaatttcatttcaggagaacagagagagtattacaaaatgtttggttaaaaggagggtaatgggcacgatccagttgaaaatgactgagcagacaaggatatggccctaatcaccatccccttcacatttggtgtggctttgcatgagatcttaaactctttaggaaagagctgctttttttttttttttttttttgagacggagtctcgctctgtcgcccaggctggagtgcagtggcgccatctcggctcactgcaagctccgcctctcgggttcacgccattctcccacctcagcctcccgagtagctgggactacaggcacccgccaccatgcccagctaattttttctatttttagtagagaccgggtttcactgtgttagccaggatggtctcaatctcctgacctcatgatccgcccgcctcggcctcccaaagtgctgggattacaggcgtgagccaccgcgcccggccgaaagagctgcttttacacactagttagcattcagtgtgtatttggtttagagaaaggccagcaaaaaaatcatccaggaaccaggcacggtggctcacgcctgtaatcccagcactttggaaggtcgaggtgggaggattgcttgagcccaggaattcgagaccagcctgggcaacatggtgaaactctttctctacaaaataaatacaaaagctagccgggcatggtggtgcactcctgtagtcccagctgcttaggaggctgaggtgggaggatggtttatgcctgggaggttgcattgagcctgagatcgtgccaatgtactccagcctgggtgacagagggagacctggtctcaaaaaaaaaaaaaaaaaaaaaaaaaagcaaaaacagcaaagggattatccagagcaggcagaggatagctcctttgtcccagatcccttgcgggtataagcaacctccacttcctggatcataagtagcaaggaacacccagccacaaaaacctgcccagttactcagtgtgtcagaggcgtttaaaccagagcgactccatcttgaataggggctgggtaaaaagaggctgagacctacagggctgcattcccaggaggttaggcattctaagtcacaggatgagatgggaggtctgcacaagatacggatcacaaagaccttgctgatagaacaggttgcggtaaagaagctggccaaatcccaccataaccaagatggcgacgagagcgacctctggtcgtcctcgctgctcatgatacgctaattataattcattggcatgctaaaagacactcccagcggcagcatgacaatttacaaatgccatgggaatgtcaggaggctaccctacatggtctaaaagagggaagaacccttgattccgagacttgcccacccctttcccagaaaactcatgaataatccaccccttgtttaccatataatcaagaaataactataagtatccttagtccagcagcccaagctgctgctctgcctatggagtagccgttctttattcttttactttcttaataaacttgctttcactttatggattcgcctctaattttttcttgtgcaagatccaagaaccctctcttgaggtctcgattgggacccctttccggtgttaaagcaaactaaatatggcctgagaaggactccgtatttctatatttgaatccttgtgggtgaaccaaaacctagcttaataggtagacaatattgaaaacctaacctagaagtatgcacctgtaacaatagctaggtcttggccaatgcctgtggccatacttcagccattcatacactgctgagtgttcaaagtctgttcaaataagggaaacaacgaggtgtaaccaatccagctgttctttaccttacttccaaattctgtacgtcatttcccattttttgtctataaaccttcttccaccacgtggctacgctggaatctctgaatctgctgtgattctgggggctacccaatttgcaaattgtcattgcttaattaaacgccattaaatttaattcggctgaagtttttcttttatcaccggtaacaactgcgcagagaacagctgcagacactaaatggaactgaagagcacaagccctgcctgggaaggtccggagggtgggaggatgctgagtggggaggagggggtgcaggggcgcgggggtgtctctgaatgcaaatagacattgccaggctaggtgcagtggttcatgcctgtaatcgcaacactttgggaggccaaggcgggcggatcatttgaggtcaggagttcaagaccagcctggccaatatggtgaaaccctgtctctactaaaaaatacaaaaattagccgggcatggtggtgggcgcctgcaatcccagctactcaggaagctaaggcaggagaatcgcttaaacccgggagggagaggttgcagtgagctgagatcgtgccattgcactccagcctgggtgacagagcaagactccgtctcaaaaaaaaaaaaaaaaatatatatatatatatagcaaatagacattgccctcccccttttccctggaaagtatctcagaagattcatcttttctgtttggcattcattatggttttccaaggcccacaggaggtcctcccttcttcagtcctatgatgatgaggacttctcaacagtcctatccattccactccataaaagttcttgcctatgtaaattttcctctggggatcgtcaggcctcccctcttcttgccaattcaggactgccaacccaccctttcaaatcctggctttggacttgatgtttcaaagctttccttccttctttgtttgccctttcccgagactcaataccagttcgcctttgcaccatgacccagagcacaggcctaacccaccctcactggagaatcaatttcggtattttccattgcctcataactgctgaccgatcatgtcctctttcaagcccagacctgactcccaagctcctggcctgggctagaatccaaggccctatttgccaaggagaagaggttggacagtttttccagctgctgccttgctgaaaccagagcctcatacccggtaccctgacctcatcagtcccatagtttgcattactcgtctctcagaggtgaggaagggctttcaccaccaatataacatttttttttcacttttggaaaagaaattaagagcatccagtgtccagtgtctacctccaagaggaatagccctgttggaaaacctaaattagccatttgggcagctctcctatgtattctgcaaagtcctattctttagggcatttcttgggtttgtactgacccactgaatttaaatgctagtgatagaatccaagattatattcgagatatcactccttccttacacctcaaacacaaaccaacaaaaacccagacatttgctaggtgtaaaagtccattagaattctgaatacaatttgattttttttcttttgattatttagaaagtatctagagtattgtgtcatgcagtggattttctggcaaataagaagtccattctgacttgcctttaagccgccttctactttggattcctttcctcctctttcttccccattggtcacctttccctacaaaaatgatcaagctccaattcccatccttctccctgtctgtgtcttgcaaatttcacaagcctctggtgtcaaaagcatgttgatggcccagtcactgctgctcctgcaaagcagtcaactaggttcctggagctccagccttcctggcttccccagggagatgagagtaagctctggtttcaacaatgtgggggatgtcttagggtagggagaggctcaacttcgagttgcagctggtttgtcctagggtatttaaaatcaaacatatgtggctgggcaaggtggctcacgcctgtaatcccagtactttttaggaggccgaagcaggtggattacctgaggttgggagtttgagacgtgcctgaccaacatggagaaactccgtctctactaaaaatacaaaattagcggggcgtggtggcacatgcctgtaatcccagctactcgggaagctgaggcaagagaatcccttgaacccgggaggcagaggttgcggtgagctaagatcgcaccattgcactctagcctgggcaacaagagtgaaactccatctcaaaaaaaaaaatcaaacatatgttgccttgattaattttctcccaaaaccctctcctgtctggactgcataggagattcatattccttctattaacacagcgttcatcctgtttcttataaacgaatctgttttgccccgtgcttagcacgtgagcctgcccatgttccttgctcacagttgcatgacaaagcatcctacctcaactgacaaccattgctggcaggcccaaattgccgggaggtttcttggcgcctcaggggatgggagcaggatgaaaattcagctcacccagcctcattacaattaggattattactcgtgtctccatgcccagcctgtcaggctgggagtgcccgaggaagtgagatttgctaattctttaaatattgagtcagcaaggtatgacctaaatagtaactctctattaaatagaactttaattacaaaacaacagcaataacaataagagcaaatctgtttttccagtctagatattattatctaggtcaggccagataaccagatttactgtacagacttcatggggctgcttttggaatatgtacagcaccataaccaccctgatgttcctgtttccaggccatcaagttcaaatcgaaatctgagaattcctatcaggaaagctcatgaccgccctttgagagattttgtaaaattgagcaaagcacatcctgacagatatttagatatagtgctacaggccattttgacaaaagcagatcatgaaactatattttaaaaatcaatttttttttgagacagagtctcattctgtcactcaggctggagtgcagtgccacaatctcagctcaccgcaacctctgcctcccaggttcaagcgattctcctgcctcagccgcccaagtagctgggactacaggcctctgccactatgcccggctaattttgtattttcagtagagataggggtttcaccatgttggccaagctggtctggaactcctgacttcaagtgatctgcctgcctcaaagtcaggagttcaagaccagcctggccaacatgatgaaaccccatctctaccaaaaatacaaaaaattagccaggtgtggtggcctgcacctgtagttccagttaattgggaggctgaggcaggaattgcctgaactcaggagacagaggttgcagtgagctgagattgcgccactgcactccagcctgggcgacagagcaagactccatctcaaacccaaacaaacaaacaaacaaacaaaccaaaagacctttgaagggaaaatgataatatgataatatgaagggcaaaattgtgatccatctggcttggtttattatgttttttcccccagaatccagtcccaatcaaagtgtgtaaacagcacataagactgtgttacctgggtcgggcacattggctcacgcctgtaatcctagcactttgggaggctgaggtgggcagatcacctgaggtcaggagttcgagaccagcctggctaatatggtgaaaccctgtctctactaaaaatacaaaaattagctgggcatgatggtgggcgcctgtaatcccagctacttgggaggctgaggcaggagaatcacttgaactcaggaggcggaggttgcagtgagccgagatcgtaccactgcactccagcctgggcgacagagcaagactccgtcaaaaagaataaataaataaagactgtgttacctgcacttctgccattcaccattccaaggaactgcctgttgggcccaggcgtttccagaaaaaaagtgaagtgcagatgactaggtgaagctcaggattttggggagggtgaaactactctgtatgatattataatgcagatacatgcacgtcattttacatttgtccaagcccataacgtacgataccaagagtgaaccttaatataaactatgggctttgagtgatgatgttgtacaggcccattgatggtaatgttactggaaaggggtcccagttctgaccccgacagagggttcttggatctcgcacaagaaagaatttgaagccaagccatagaggaaagtgaaagcaagtttattaggaaagtaaaggaataaagaatggctgttccataggcagaacagccccgaggtctgctagctggcaacttttatggtcatttcctgattatatgctaaaccagggatggattattcatgagttttctggaaaggagtgggcaattcctggaactgagggttccttccttttttagaccatatagggtaacttctggacattgccatggcatttgtaagctgtcatgccactgatgggagtgtcttttagcatgctaatacattataatgagcatgtaatgagcaatgaggatgaccagagatcactttcatccccatcttggttttggtgggatttgaccagcttctttaccacatcattttatcagcaaggtctttgtgacctgtatcttgtgccgacctcctatctcatcctgtgattaagaatgccttaacctcctgggaatatagccagtaggtctcagccagcaggtctcagccttattttacccagctcctgttcaagatggagtagctctcgttcaaatgcctctgacagtaacaaaggtaccactcgggcgggggatattgataatgggggaggctgtcctatatgggggcaataggtatatgagaagtctctgtatcttcctcagttttgatgcaaacttaaaactgttctaaattattaaagtctattggaataaagaaaaatgcaaagtgctggtactagtgccttaattataaaatgccttacctacatttctcatagccccaaagtactatctctccattgaggacgatcagataaccttctaattaaaaggttgggccgggcacggttgctcatgcctgtaatcccagcactttaggaggctgaggcgagaggatcaccttaggtcgggagttcaagatcagcctggccaacatagcgaaaccccgtctctactaaaatacaaaaattagccaggcatggtgctgggtgcctgtaatcccagctattcaggagacagaagctaaagaattgcctgaacccgggaggtggaggttgcagtgagccgagattgtgccactgcactgcactccagcctgaacgacagagcaggactctgttcaaaaaacaaacaaacaaacaaacaaaaaaagttgctgaagaaactaaaatacatcacaaaaagctccccccacctttttttttttttgagatgaggccttgctctgtcgcccaggctggagtacagtggcatgacctcggctcactgtagcctccacctcctgggttcaaataattctcctgcttcagcctcccaagtagctgggattaaaggtatctgcccagctagtttttgtatttttagtagagacagtgtttctccgtgttggccaggctggtcctgaactcctgacctcggatgatccgcctgcctcggccttccaaagtgctaggattacaggcgtcagccactgcacccagcctgccccgctaatttttgtatttttagtagagacagggtttcgccatgttggtctggggccaggctggtcttgaactcctggcctcaagtgattcccccaaagtgctaggaaaacaggcatgagctaccatgcccagcccaaatcacttatttttcatataaattagagtgtattctagattatctttatatcatcactcacattcgttgactcattcaacaaacatttatggagtgcccacacacatgaacaaagcaaagcacctgcccttggaaagcttatgctcttaaacaacagactggtaaacaaatatataacctagtgcagggtagcagtaagtgcaaggtaaggagacagttacccaggtgacccaagatagttttactaaggaatgtaaatagtacattttgggtggagactttatggagtaagagggagtcatgcaaaaatcagaaggaaggccaggtgttgtggctcaagcctgtaatcccagaagtttgggaggccaaggcaagtggaccacttgaggccaggagttcgagaccagcctggccaacacagtgaaaccccgtatctacttaacatacaaaatttagctgggcatggtggtgggcaactctaatcccaactacttgggaggctgaggcatgagaattacttgaacccgggaggtggagggtgctgtgagctgagatcacgccactgcactccagccacagcgacagagtgagatcatcttaaaacacaacaaacaaacaaaaaaatctaaaggaagggaaccagcacaccaaccctgaggtggtgtatgagttaggaggatttttgcccttggcagtacaatatccactgaaggatggcttaggccatacatccacctactaggtaccacaaaaataataaataaaataaaataaaataaagaatgggttaggccagcagttctcaaaatgtcatctggggaccccctgggaatatccatgacctcttctcaaagcctccaccaggttaaagttttttttgtttgttttttgagatggagtttcgctctttcacccaggcaggagtgaagtagcacaatcttggctcactgcaacctccacccccgcaaagttcaagcgattttcctgcctcagcctcccaagtagctgggattataggcccgcaccaccacgcctagctcatttttgtatttttagtagagacaagttttcaccatgttgaccacgctggtctcgaactcctgacctcaggtgatccacccaactcggcctcccatagtgctaggattacagatgtgagccactgcatccagccagttaaagtatttttataataatcccaagatcacagtcattcttttttttttttttttttaagatggagtctcactctgttgcccaagctagagtgcagtggcatgatcttggctaactgcaacctcagcttcctgggttcaagcaacaattctctgccttaacctcccgagtagctgggattacaggggcctcccaccacgcctggctaatttttttgtatttttagcagagatggggtttcaccgtcttggccaggctggtcttgaacaactgacctcgtgatccacccgcctcagcctcccaaagtgctgggattataggcatgagccactgcactagacccacactcattcttttatacatgtaaactggagtagctgtgtatcatgtgtgatacacaacagattgaatacagaaactactatgaggccctagctacctagagttatttcagacattaaagagatttgcaggccaggtgtggtgactcacacctgtaatcccaacactgggaggccaaggtgggcggatcaagaggtcaggattttgagaccagcctggctatcatagtgaaaccccatctccactaaaaatagaaaaattagctgggcatggtggcacatgcctgtaatcccaactactcaggtggctgaggcaagagaatcgcttgaacctgggaggcggaggttgcagtgagctgagattgcaccactgcactccagcctgggcgacaaagcgaactccatctcgaaaaaaaaaaagagatttgcaaaaatgtaaaacgactgctcttttactaatctctttttcttttggaaaatatgataattttttataaaaacatgttgtttatattaacaaaaagacagcactcataaacaaaagcttcttggggtcttcaataatttttaagtgcttaaagaggtcctgagaccggaagtttgacagccgctggcttaaccagtaaggatatgtatgacttcacataatcagaggttcaaaggcagaggcatgggttccgggttaaacgcaggggctcaaccatgccactgaagaccgaggtactttccagctttccaactgtccatttggccacactcagcatgtcagcagcatccctcgctgtggtcaaaagatggctgagcagttccaggcatcacagataagcatgcagctagccaagaaaggcatttcctcccatgagtgtccttgcactaggggagctaaaaatacaaaaatacaggccgggcgtggtggctcacgcctgtaatcccagcactttgggaggccgaggtgggcggatctcctgaggtcaggagttcgagaccagcctggccaacatggcgaaacactgtctctactaaaaatacacacatacacacaaacacacacacacacagacacacacacacacaaattagttgggcatggtggcgtgtgcctgtaatcccagctacccaggaggctgaggcaggagaatcactggaacctgggaggcagaggctgcagtgagccaagatcacgccactgcactctatcctgggtgacagagcaagactctatctcaaaaaagacaaaaaacaaacaaaaaaacccaaaaatatcatctctactaaaaacacaaaaaattagccaggcatggtgacatgcgcctgtaatcccagctacttgggaggctgaggcaggagaattgcttgaacctggcaggcggaagttgcagtgagctgagaccatgccactgcactccagccttggcaacagagtgagactccgtctcaaaaaaaaaaaaatgatttgccagacagtagaatggcagttgacaggagctgaaaggtgggaggaatggggaattgcatgatgggtacagagtttctgttggggatgataaaaaatgttctggggctggatggagatgatggtcgcacggcaatgtgaatgtattttgtgctacagcctgtacacctggtacaccagactgtacactgtacaagtggttgaaatagtacattttctgttatgtatgttttatcacaataaaaaaattagtcatttgcaaatgtgggtacttgaatcattacaggtaacagattacctctgatatagctcaaatgagagaggcttttacatctactaagacactaagtattttcgggcagggcacagtggctcacgcctgtaatcccagcactttgggaggctgcagtgggaagatcgcttgagcccaggagttcgaaaccagatgggcaacatagtgaagccttatctctacaaaaaaaatgtacaaaagaattagctgggggtggtggtgtgtgcacagaggtgggaggatcctgggtagagcctgggtggtagaggctgcagtgagccaagatcatgccactgcactccaaggcgagaccttatcttaaaaaaaaaaaaaaaaaaaaagatgggagccggcctgtaatcccagcactttcggaggccgaggcaggtggatcacttgaggttaggagttccagaccagcctggccaacgtgacaaaaccccgtgtctattaaaaacacaaaaatgagctgggcatggtagtgggtgcctataatcccagctactcaggaggctgagacgggagaatcgcttgaacctgggaggtggaggttgcagtgagccaagatcacaccattgcactccagcttgagtgacagaatgaaactttgtctcaaacaaaaaaaaaagacactattattttcatcatcaacaaagctctggtccagctaatggtcgaattcatttgcaaaaattttcattcacagtcacttattctttacaactaagtcagctagggagggacagatcatctatttgcatgaaagcaagggggaaaccagggcagtgctatgtactgaactgtttcacactatcacaaataaaattgcaggttgagcctcacttcacacacacacacactcacacacacacacacacacacacacacgtgcgcacgcagagtatcaggaaatagcctgtccgttttggctgcagacgcagggattttggtttccttggcttctgagctgttcttggagcggggccatctagggaaactgagcaagtacacggggccatcaaacttgggctggatccatcaggcacacaaaaaacactctccagctctctccccgaagtggagcagacaaaagtgctgttgatgctgaagctgcagaaagcttcagaaggccccgtgggaggaagcttggcacgagaggcgagcagctccaactgaccctggaagggagcagcaggctggggtgagatccagactccgctcagatcggaatgcctgcaccctttgccttgcctcactgtgaaggagagaaacggtctgcctggtaggtttcccctggtgtctgagaaattttctcaaaaaaaaacacctcccaccacccatggaaaaaatgctcatgatacagtgttgaatgaaaaagtcaagattatatatatacatctatctatctatcttttttttggagacagtcttactctgtcgcccaggctggagtgcagtgacaccatctcggctcactgcaacctctgcctctctgggttcaagtgattctcttgcctcagtctcccgagtagctgggattacaggtgcacatcaccatatccagctaatttttgtattttttatagagatggggtttcaccatgttgcccaggctggtctcaaactcctgagctcaggtgatctgcccaccttggcctcccaaagtggtaggattgcaggcatgagccatcgcgcctggctctatctatctaataccacctatgttaaaaaaaaaataataattttgccaggcatggtggtatgtgcctgtagtcccagctactctggaggctaagtagggaggatcccttgagcccaggaatttgaggccagcctgggcaacatagcaagaccccgttccattaaaaaaaaatttttttaaagcatgcattgaaaaacaaggccagaaggaaatacaatacaatattatcagtgatgttctctgggtggttggataacaggtcattttgtatttcttcttgacatttttctacagcttttaaattttcctccagctaggatgtgttttttgattatcataaatagaccttataataataatggacaccaccccaaactccaccaacccagtggcccctcagcctgggggaaggtgtgggctgtggaaaaatgggtggggaatgctcttcagaaatatttggcagttgcaatatgcttgctgctgagggaaaacgcctggaaggccagagctagagtacaccccctgcctctttgcctttgagtttccctccgtgttactccggtttcccagactattggcttatttagcaagaaatacagtagcagatatttttcccaggcaattgcagtccaaacttctagagcaaaaccagcttcttgcccctactccccgccccgtattcctcacctgatcttctgaaagacttttctgtttactttccacaactttcgcagctgcctcaacctgtctggcacctctgagagagtggcccacactcctggggtcccggctgctttctggctcaaggctcctgacacccataagccctccctcctgcctcccctgccatgctgggaccacgtggctaacaccagctgcactgtggataatgacatagccagagtctgtcccttggaaacatttagcgtgttccgcggaggaaaaacttagctcatctcaagaaagagaagagagttagggacagtggattctacaggactctattttttggctggttttttttttttttttttttttttttttttgagacggagtctcgctgtcgcccaggcagtggtgtcgccagtgcagtggtgcgatctcggctcactgcaggctccgccccctggggttcacgccattctcttgcctcagcctcccgagtagctgggactacaggcgcccgccacctcgtccggctaattttttgtatttttagtagagacggggtttcaccgtgttagccaggatggtctcgatctccgacctcgtgatccgcccgcctcggcctcccaaagtgctgggattacaggcatgagccactgcgccccgccttttttttttcagacggagtttcactcctgttgcccaggcgggagtgcagtgacaccatcttggctcaccgcaacctccgcctcctgggttcaagcaattctcctgcttcagcctcccaagtagctggggttacaggtgcccgccaccacatccagctaatttttgtatgttttagcagagatggggtttcaatatgttggccaggctggtctcaagctcctgacctcagatgatccacacatcttggcccatgctggggttacagatgtgagccaccgtgcccagtcctttttttgttattttaaatatcattagatttttgcagcccttaatttcccaaagaatgaattttcttcacatgaatggtgaggctgtctcacagccacctcacagaagcagcatcatgcctcttcatagcttggcattagtcactttctctgaattctcactttgcggttggggtgggctggatggagccttagaatgtgcctaagagggtgccccggagctttgggagagggactcatatttaagaatagagtgagggcccggtgcggcggctcacgcctgtaatcccagcactttgggaggccaagacaggcagatcacctgaggtcaagagtttgagaagagcccaactaacgtagtgaaaccccgactctactaaaattacaaaaattagctaggcatggtggcatgtgcctgtaatcccagctactcgggaggctgaggcaggaggatcacttgaacctgggaggtggaggttgcagtgagcagagatcgcgccactgcactccaacctgggtgacagagagagactctgtctcaaaaataaaaatatggccaggcccgctggctcacatctgtaatcccagcactttgggaggctgaggcaggtggatcacctgaggtcaggaattcgagaccagcctggccaacatggtggaccctgtttctactaaaaacacaaaagttagctgggtgtggtggcgggcgcctgtaatcccagctactcaggaggctgaggcaggagaatcgcttgaacctgggagggggaggttgcagtgagccaagattgtgccattgtactgcagcctgggcgacaacagcaagactctgtcttaaaaaaaaaaaaaagtttaaaaaaaaaacaaaaacaaaacaaaagaatagagtgacgacatctgggaaggctgaggctgaggggctggaaacctggcttgagagaaggatgaggtgatgagagctagaaagtttgcagctgtggccaccctcgggcacctctcccactcacacagagcagcctgcctcaatgtctgcctccctctcaggtgggtgggctgggggctgtctgtggaggtggaggcagagctccctgctgtccatgagaagttcaaggcaatgaggcatgcccactctgagttcctggctgggaggagggtcaggagagggccaaccctcaagccctgttctttgtctcttttttttttttttttttttttttgtcatcactcaggctggagtgcagtggcaccatcacagctcactgcagcctcaaccatctgggctgaagcaatcttcccacctcagcctcccgagtagctggtaccacaggtacacaccaacacacctggataatttttgtatttattgtagagtaggggttttgccatgttgaccatgggtggtctcgaactcctgggctccagcgatgtgccctcctgggcctcccacagtgctgggattgcaggcgtgagccatgtgtccagcctccgctgctcttgtcttggagatgacgccaaccttgggggaggaacgtctatcgttctacttcttcttccccttctccaactgggctccttccattgccctatcctcccgagtcagaaaggaaaattccctagggctcaccccctccctctcctgcaggcctgcgtcccttcctggggctgaagcttctgggcctgccccagggtcctgaacggctgacaacacacggatcaactggaccactggtgaccacagaaaggaggctgcagctgtttcttgctacgcttcgagagatcaaagagcgtgcggagcactggcccgcttcaaagaacaagacccaggagaggaagggcctcgcagacctcctgactcaaggcgacctcctcctgattcagggcaccctcctgacttagggcacatttaggctcctgcaaagggagcgcagcctgaggccgtgaacagcgccaccccctagtggcttagaagggccatgctagtctctccaggaagccaggtatcattcgtttctttaaaaataaaaccaaacaggccgggcgcggtggctcatgccaataatcccagcaccttgggaggtcgaggtgggcggatcacctggggtcaggagttcaagaccagcctggccaacacggtgaaaccctgtctctactaaaagtacaaaaattagttaagcgtggtggcacacgcctgtaatcccagctactctagaggctgaggcaggagtaatcgcttgaacccaggaggtggaagttgcagtgagccaaaatcgcaccattgcactccagcctgggcgacaagagtgaagctctgtctcaacaacaacaaaaaaccaaacaataaagtatatatatatataaagtatattttaaaatatatataacatataaatatatattttttaatacatataaatatattttatttgaactcctgacctcaaatgatccacccagctcagcctcccaaagtgctaggattacaggcgtgagccacagcgcatggcctttttgttttataaaactttttttttttttctgagacagagtcttgttctgttccccaggctggggtgcagtggcgccatccttgactcactgcatcctcgaccccctgggctcaagtgatcctcctgagaggtgacagcgtgctggcagccctggctcgctctctgcgcctcctctgcctgggtcccactttggcggcacttgaggagcccttcagcccgccgctgcactgtgggagacccgtcctgggctggccaagaccggagccggcttcctcagcttgccgggaggtgtggagggagaggcgcaggcaggaaccggggctgcgtgcggcgcttgcgggccagcgcgagttccgggtgtgcgtgggctcggcgggccccgcactcggagcggccccccagcccacaagccccaggcattgaggggcttagcacctgggccagcagctgctgtgctcgacttctcgccaggccttagctggctccccgcggggcagggctcgggacctgcagcccgccatgcctgagcctcccctccccgccatggatgggttcctgcgcggctggagccttcccaaggatcgccgccccctgctccagggcgcccagtcccatcgaccacccaagggctgaggagtgcggcggcacagcaccggactggtaggcagctccacctgcggccttggtgcaggatccactgggtgaagccagctgggctcctgagtctggtgaggacttggagaacctttatgtttagctaagggattgtaaatacaccagtcggcactctgtatctagctcaaggtttgtaaacacaccaatcagcaccctgtgtctagctcagggtttgtgaatgcaccaatccacactctgtatgtggcttctctggtggggacttggagaacctttatgtctagctaagggattgtaaatacaccaatcggcactctgtatctagctcaaggtttgtaaacacaccaatcagcaccctgtgtctagctcagggtttgtgaatgcaccaatcaacactctgtatctagctactctggtggggacttggagaacttttgtgtccacaccctgtatctagctaatctagtggggatgtggagaacttttgtgtctagctcagggattgtaaacgcaccaatcagcaccctgtcaaaacggaccaatcagctctctgtaaaatggaccaatcagcaggatgtgggtggggccagataagggaataaaactgcttaaaactgcttgcccgagccaaaagtggcaacccgctggggttcgtgtccatgctatggaagccttgttctttcactctgcaataaatattactgctgctcactttttgggtccactctgcctttatgagctgtaacactcaccgggaagatctacaacttcactccttgagccagggagaccacgaacccctcggggaaggaacgaagaattccagacgcaccgtcttaagagctgtaacgctcaccgcgaaggtctgcagcttcacttctgagccagcgagaccacgagcccaccagatggaagaaactccaaacacatccgaacatcagaaggaacaaactccggacacactgcctttaagaactataacactcaccgcgagggtctgcggcttcattctttaagtcagtgagaccaagaacccaccaattctggacacacttccacctcagtttcctgagtagttgggaccacaggtgtgcaccaccacgtctggataattgttatatttgttttgcagagaaggtttcaccgcattgcccacgctggcttcaaactcctgtgctcaaggaatccacccacctcagcctcccaaagtgctgagattaccattgtaacccagtgcctggccctagaaaagtgttttgtagctgggcaacatagcaaaacctcgtctctataaaataaacattttaaaaccagccaccatggtgggacatgcctgcaatcacagctactaaaggggctccaggatcacttgagcctaagtgttcgatgctgctgcagcctaggtgacagagtgagaccctgtctccaaaccaaatatatatttatatacatctatatgttatataaaattacatatttttatatattttatatatatatatatatatattttgagatggagtctcaccctgccgcccaggctggagtgaaatggtgcaatctcagctcactacagcctccgcctcccaggttcaagcaattcgtctgcctcagcctcccaagtaacggattacatgcacctgccatcacgtctggctaattttttttgtatttttagtagagacggggtttcaccatattggccaggctggtctcaaactcctgacctcatgatccgcccgcctcagccttccaaagtgctgggattgtaggcgtgagccaccgcacccggccacccattccaatgaactcaccgcaaattcagtccttcatgtctcagatccctcctgagacatcgccgtgaccacctccagtggctttgtagtggtttatccgtgagccttggacaagcccctatacctcctggagcctatgtctatctcatttgtaaaaggaggagatgggacaaggtgagtcgctcctgagggctctgacaccctccaagcccatgagacgcagaggggagacacagatgatttttgtttctcactatcaataagctctttagtgaccctcactccctgggcaaaagaataaaaatcatacatgtaatgaaaaaaaggccagagaaacattgccctatcctccggggtcacaaaggaaaattccctagggctcgccccctccctcttctgcaggcctgcgtcccttcctggggctgaagcttctgggcctgccccagggtcctgaacggctaacaacatacgggtcaactggaccactggtgaccacagaaaggaggctgcagctgtttcttgctaccctttgagagatcaaagagcgtgccgagcactggcccgcttcggagaacaagacccaggagaggaagggcctcgcagacctcctgactcagggcgcttaatgagcagaaaagctgggttatctccaaagattgaaaaccatcctctgccccaagtcatttaatacagcccactcaagggaaataacttacccagaattccaccacacaccattcatcaactcaacagacatgtgcaatcgcacacccaataccaatgctgctgttaatgacagaccacgtatattatatggtagtcctgtaagattataacggggctgaaaaactatcacctagtgacagcgtagacatgtcatagcacagacattattcacgtttctggtgatgctggtatcatgtaaaaatctagcacataggccgggcgcagtggctcatgcttgtaatcccagcactttgagaggccaaggcgggcagattacctgaggtcaggagttcaagaccagcttggccaacatggtgaaaccctgtctctactcaaaatacaaaaattagcctggcatgatggcaggtgcatgtaatcccagctacttaggaggctgaggcgggggaatcgcctgaaaccaggaggtggaggttgcagtgagctgagatccagccactgcactccagcctggcacatacaattatgtaaaatatataatacttgataataaatgactatgttactggtttatgactatagtatattttttattgttattttagagtgtattctttctacttttttttttttttttttgagacggagtcttgctctgtcgcccaggctggagtgcagtggcgcgatctcagctcactgcaagctccgcctcccaggttcatgtcattctcctgtctcagcctcccaagtagctgggactacaggcgcctgcctgcgcctggctaattttttttttgtatttttagtagagacggggtttcactgtgtcagccaggatggtcttgatctcttgacctcatgattcgcacctcggcctcccaaagtgctgggatcacaggcgtgagccactgcacccagcctattctttctacttattgaaaaaaagttggccaggtgcagtggctcacacccataatcccagcactttgggaggccgaggtgggtggattactttgaggccaggaattcgacaccagcctggccaacatggtgaaaccctctctttactaaaaatacaaaatcagccgggcgtggtggcatgcgtctgtaatcccagctacttggtaggctgaagccggaggatgactggaacccaggagttcgaggctgcagtgatctgtgattaccactgcactccagcctgggtgacagagtaagactccatctaaaaaaacaaaacaaaacaaaggtaactgtaaaacagcctcaggcaggtactcaggaggcattacagaagcagtaatggttatcataggagatgacagctccatgcatgttattgcccctgaagaccttccagtgggacaagacttggaggtggaagagagtgatgatgatgatcctgaccctatgtaggctgaggctatttatgtacgggttttttgtttgtctgttttgacacagggttttactcctgttgccaggactaagtgcaatggcgtgatctctgctcactgcagcctccacctcctaggttcaagcaattcttctgcctcagcctcccaagtagctgagactacaggcatgcgtcaccatacctggctaatttttgtgttttttgaagagacagggttttgccatgttgcccagggtggtctcgaaatcctggcctcaagcgatcctctgacctcggcctcccaaagttctaggtgtgagcggctgcacccgacccgagttatgtatgtttttaacaaaaagtttaaaaactaaaaataaaaaattgtaaaaatagaaaaaagtgtatagaatatggatataaaggaagataacatttttgtaaggtgtacaatgtgtttattttttgtctttatttttttgagacagagtgttgctctgtcgcacaggctggagtgcagtggcacagtctcggctcaccgcaagctctgcctcctgggttcacgccattctcctgcctcagcctcccgagtagctgggactacaggcgcgcactgccatgctcagctagttttttttgtatttttagtagtcactgtgttagccaggatggtctcgatctcttgacctcgtgatatgccctcctcggcctcccaaagtgctgggattacaggcgtgagccaccacgccctgcagtgttaatgttttaaatgttattactagggtctaaaggttcaaaaattaaatcttactaaatgaaaaaagtttatagtaaactaagtttagtttattattgaagaaagaaaaacattttaaaataaatttagtgtactaggccgggcgcggtggctcatgcctgtaatcccagcactttggaaggccaaggtgggtggatcacgaggtcaggagttcaagaccagcctggccacatggtgaaaccctgtctctattaaaaatacaaaaattagccaggcatggtggcatgggcctgtaatcccagctactcaggaggctgaggcaggagaatcacttgaatccgggaggcagagtttacagtgagccgagatcgagccactgcactccaggctgggtgacagagtgagactctgtctcaaataaataaataaataaataaatgtagtgtagcctaagtgtccagtgttgataaagtctgcagtagagtacagtgatgccctaggccttcacatttattcaccacccactcactggttaacccagagcaacttccagtcctgcaagctttattattgtaaatgctctatatacctataccatttttaatcttttatttttactgtacctcttctcttctcttcttttcttttcttttttgagacagggtctcaccctgtcacccaggttggagtacagtggtgtgatcctggctcactgcaacctctgcttcccaggctcaagtgatctcctcacctcagcctccagagtagctggcactacaggcgtgcgccaccatgcctggctaatttttatatttttttggtagagacggggtttcgccatgttgcctaggctggaaagggggtgagggataaaagactacaaatagggtgcagtgtatactgcttgggtgatgggtgcaccaaaatctcacaaatcaccactaaagaacttacttgtgtaaccaaacatcacctgcaccccaataacctatggggaaaaaaaagactgggcaacacagtgagagccgatctccacaaaaacaaaaataagaataaattagccaagcatggtggcatgtgcccatagttgcagctacttgggaggctaaggtgagaggattgcttgagccggggaggttgaggctacagtgagccacgattgccccgctgcactccagcctgggcaacagagcaagatgctgtctcaaaataaataaattaattaattaaataaagccaggggcccgaatgagaagatctggggagaggctgtggacaagaaagagaagaggccgaggagagtccctggcaccctgcaacagcgacaggtctggtggtggtggtggtggagcagccattgcatacggtgtggtggcaactggcacagaagcctagagaggaaagtgtttcaggtggggcacagtggctcctgtaatcccagcactttgggaggccaaggtgggtgtggatcagctgaagtcaggagtttgagaccagcctggacaacacggcgaaacccccacctctactgaaaatacaaaaattagccgggcatggtagcacatgcctgtagtcccagctactcgggaggctgaggcaggagaatcccttgatcccaggaggcagaggttgtagtgagctgagatcgatcgtgctattgcactccagcctgggcgacaagagtgaaactccgtctcaaaaaagaaagaaagaatttcagtaaggcagtggttaaccaagactagggctgctgagagatgggaataggacacccggccactggacgtgattggatggagggtgtcagtccccttgaaagagtcatttcaggccgggcacggtggctcacgcctgtaatcccaacactttgggaggccgaggcaggcagatcacgaggtcaggagattgagaccatcctggccaacatggtgaaaccccgtctctactaaaaatacaaaaattagctgggggtggtggtgcgcgactgtaatctcagctgctagggaggctaaggcaggagaatctcttgaacccaggagtcagaggttgcagtgagccaagatcgagccactgcactgtagcctggtgacagagcaagactccatctcgaaaaaaaaaaaaaacagtcatttcatatgaatggtagacaccaaagctagtttgctttctgcaatctgaagagaggagggagcagcagatgtacacccagtgaatctgcctgtagaaaatgtttgtggcaaagccactgctacttcttggactcctttatactcgtatttatttatttatttatttatttatttttgagacaaagtctggctctgtcgcctaggctggagtgcagtggcatgatcttggctcactgcaacctccacctcccagattcaagcgattctcgtgccttagcctcccgagtagctgggactacaggcacccaccaccacgcccagctgatttttgtatttttagtggagatgcagttttaccatgttggccaggctggtctggaactcctggcctcaagccacccgccctcctcagtctcccaaagcgctgagattagaggcgtgagtcactgtgcccgacccacctttatactcttgatacatctctcatccagaggagtggggagcaggtctgcatttgctacaatcggtgtttgacaatcccaagatctcagtattctatcgatcactaggaagatgtacagatggcttaatttaaagacagtataatcgtgtggaaaatagcaactgtcttagcctggattctccaggaagcacagcctgaggcaaaagcttatgtgctactaatttattagggagtggaatttcagggagcaggagcaggggaccaagggagaggggccacaaaggagggagagtcaacactagaaggaaggcaaggcacattattattattattattattattattattattattattatttgagatggagtctcgcactgtcacacaagctggagtgcagtggtgccatctccacccactgcaacctccatctcctgggttcaagcaattctcctgcctaagcctcctgagtagctgggactacaggtgcacgccaccatgcctggctaatttttgcatttttagtagagatggggtttcaccaggttggccaggctggtctcaaactcttgacctcaagtgatctgcccacttcgccctcccagagttctgggattacagacgtgagccactgcggctggaaggtacgttattaaactggctgctactaaatgtggctgactgctcaatcctgggggactgtcctccaacaaatcacctaatctgcatcttaggatagtcatctcactccagagtgagaaacaggaaagaagccatccccagctcccttccccaattggccaaggctttgcctcatggtatgctaactcacccccctgcagtagcacaggcttgcacaagtgccagactggggtcctgctctgtcctatgtcaacggggaagccctagagtgggacggaagtgataatgcagacccacggcaagacacggtgtggccgtgcaagctttaagttgtttgaagtctacgcggaagaggtagttggaaaagtaacagatggggctgaaaaggcctgaggtggtgcatgagaggtattgatgtatcatctgaacaataattggaactgtcattctaaagaatacaacagccagaaatgtcagtaagaccttgtgtctttcagagaacaacggaaccatgatgtgtgttcaggggtgtttacagcagcactgcttgtaataggaaaaaaaaaatcacaatcaagaacaatgggaaaaagcattcaaacaatggggactggttaataagtgatggtatttaatacactaaagaatctaagccttcagtgaaaagaaggatgatgaggggtggggagcaaaaaggagggacgggaagaagagtttacaaagggacaccaggaaagttctgggggtcacagatatgtccactgttgacattggtgagagttttatgggtgtatacagatgtaaaaactcaagaagtgtacactttaaatagtgaagtttattatatgtttatcataccccaaataaaactattaaaataataaaaataaaaattttaaaatgataaaacctggaaaccaccattcaatcagtaggggattggtgaataaatggtggtatttaatacatgaaaaatttaggccagccacggtggctcatgcctataatcccagcactttgggaggccgaggcgggcacatcacttgaggtcaggagttcgagaccagcctggccaacaggagaaaccctgtctctactaaaaatgcaaatatcagctgggcgtggcaatgcacacctgtagtcccaggtactcgggaggctgagggaggagaatcatttgaggttgcagtgagcaaagaccatgccactgcactccagccttggtgacagagcgagactttgtctcaaaaaaaaaaaaaaagaaaaaaaaagcatccattaagaaggaggaagacgggtacaaggagatttggacacatcccccaagacatattaaatgaaaaaagcaaagtacagaacgatgcatctaagatagtctcttttgtgttcagttttagagatttacacatgtgggcaggctagaacatttggggctagaacacaacagaaaacgagccaggcctgtaatcccagcactttgggaggccgaggagggcagatcatgaggtcaggagatcaagaccagcctggctaacacggtgaaaccccatctctactaaaaatataaaacattagctgggtgtggtggcagatgcctgtaatcccagctactcgggaggctgaggcaggagaatcgcttgaacccgggaggcggagttttcagtgagccgagatcactccattgcactccattgtttgtttgtttgtttgtttgtttttgagatggagtctcgctctgccgcccaggctggatggcagtggtgtgatctcggctcactgcaagctccgcctcccgggttcacgccattctcctgcctcagcctcccgagtagctgggactacaggcgcccgcaccacgccggctaattttttgtatttttagtagaggcggggtttcactgtgttagccaggatgtctcgatctgctgacctcatgatccgcccgcctctgcctcccaaagtgctgggattacaggcgggagccaccgcgcccggcccatgcttccatatttttatgcagcaagaaggagtgaaaagctagctccccaatcatagaacagaaacctttcctctgggtttgattggaccaacatagagtctaatctaactgaagtcaaacctgtgattgaaggtagtgtagctggacgagccacagacaaaactcctcagacacacgattaaagaaggaagaggtttattcagccgggagcgtcagcaggcttgcgtcttaagagccgagctcccggccgggcgcggtggctcacgcctgtaatcctagcactttgggaggccgaggcaggtggatcaccaggttaggagatcgcgaccatcctggctaacacggtgaaaccccgtctctgctagaaacacaaaaaattagccgggcgtggtggcgggcgcctgtggtcccagctactcgggaggctgaggcaggagaatggcgtgaacctgggaggcggagcttgcagtgagctgagatggtgccactgcactccagcctgggcaacagagcgagactctgcctcaaaaaaaaacagagccgagctccctgaaaaagaaattattggccttttaaaaggtttataactctaaggggtccacgtgaaaggggtgtaataaattgagcaagcgtggggaacgtgactgagagctacaggcatcagctaacagaacagaaagttttgcagtgctttttcatacaatgtctggaatttacagataacacaagtaatttaggtcaggggttgatattatcattattactttttttaactcctagggccgggtcgtggtgcaagcttgtctggctatttatcttacttctgtttcttcccaactttttgctttctctctttcctcctgtcttgtgaactaggcaaggtggggggaggagggcagcaggagtagtagtggtctccttccttagtaggatcccactacttgtgagaggaaaaagaataccaggtaggcaatgagcagaatctactactggtacattcctaaaatttttttgtaaaagatatttgagaacttggccaggtgcagtgactcatgtctataatcccagcactttgggaggctgagccgggtggatcacttgagctcaggagttgaagatcagcctgggcaacatggcgaaacctcatctctacaaaatatacaaaaattagtcaggcacagtggtgcatgtctgtggtcccagctacttgggaggctgaggtgggaggattacttgagcctgggaggcagaggttgcagtgagtacagatggcaccgctgcactccagcctgggtgacagtgccagatcctgtctcaaaaaaaaaaaaaaaagatatttaagaatttggcactgtgtgcagtggctcacacctgtaatcccagcactttgggaggctgaggcaggtggatcacttgaggtcaggagtttaagaccagcctggccaacatggtgaaaccctgtctctactaaaaatacaaaaattagccaggagcggtagtgggcgcctgtagtcccagctactcaggaggctgaggcaggagaattgcttgaacccaggaggcagaggttgcagtgagccgagatcacaccactgcactccagcctgggcaacagagtgagactccatctcaaaaaaaaaaaaaagaagaagaacttgttaaaggtgttttcctttggggagagggtttcaggttgagggtaatggatggagactttattttatacagtcctgtataattcgatttgttttacagttttttttaaaattcagacttaactgtgtggtagaattataggcccttttagttttcattcttttataccatctgcattagaaaaagagagagaaaaaaattcctacaaaaagaaaaattgcgaatgggattaaagaaaatgtttgcaggtaagaattggtgtgcagttatatgaagattagaattagagctatgtaataaatgagtttattcagtaagtttaatattttagttagtctctgctgtttagcgaactatcccaacaacttattgtttcaacaacaatttcttatttctcatttgatgtgttgactgagaagttcttttgctggtctggcctgggctcactcatggttacattcagctgcaggtcagattgggaccaaggtcaggtgggatggctagacagtgggcctgtctctccgggtggcctttccagcaggatggcctagacagccttccaggaggaccagccccatacagaggctcttgtcaagtctctgctggcattccacttgctgttgtcccatgggccaagcaaatcacatggccaagcccagagtcaccatgagaggggattataccagggcatgggtattaagaggcatgatgcactgggggacgttattattattattactattactattattactatttctacaactacaaactacttaaagaacaatgtctttaaataaaggagaaactcagtttcgagagacattttcaacaccccaaattatgcactctgtgttatggatagacaaatgctctgttcagacaacataattaaacctgtgtgataaccaaacacgtggcataatgaggaactgaaagcaaatttgcacaataaacatcaaaagaaaaaaaattaatgtaaatattaaaacaggctaggcctaggcgacagagcgagactccgtctcaaaacaaaatgaaaaaaacaggctggacatggtggctcacgcctgtaatcccagcactttgagaggccgttgtgggggggtgatttgagttcaggagttcaagaccagcctgggcaacatggtgaaaccttgtttctactaaaaatacaaaaattagctgggcgtgctggcatgtgcctgtaatcccagctacacaagaagctgaggtgggagaattgcttgaacctgggaggtggaggttgcagtgagacaagatcgtaccattgcactccagccttggcaacaagagcgtctcgaataaataagtaaataaataaatagtaaaacaacactaaatccagtgtttcacagatgaacagctatgacttcatgatattccagcccaaagtcctactttctcttctttgctgctgccaagttgatagtttcctagatgaacagtgtggggagttggactgaacagctcatcagaattcactcgatgtgaacagccaatctgaattaatcagatctaaactcatcactccctgtgtttgattcccctccaagagcacagtgaaggagaaaaagtgagtactaagttattcagctaattcattttaagaagtgtgggcaaacatatacatgatatatgttgtcaggaaacaaacgaggcatatgacagtcctttccctcaacaagcgaacagtccaatgagaggaaatagacttaatgctggccgggcgcggtggctgacgcctgtaatcgcaacactttgggaggccgaggcaggtggattatctgaggtcaggagttcgagaccagcctggccaacgtagtgaaattctgtctctactaaaatacaaaaattagccaggcagggtggcacatggctgtaatctcagctacttgggaggctgaggcaagagacttacttgagcctgggaggcagagtttgcagtgagctgagatcacaccactgcactccaggcttccagcctgagcaacagaactagacttaatgccaagaggccaggcactggtagatactgacatgggggaaaagggaggggaacaaggaggtgctgtggttcacacctgtaatcttagcactttgggagaccagagcaggaagatcacttgaggccaggagttcaagaccagactggacaccatagcgagaccccatctctacaaaaaattaaaaataaaaaaattagccaggtatgatggcgtgcacctgtagtcccagctatttaggaagttgaggcagaagggttgcttgagccaaggagtttgaagttgcagtgagccgtgatgacaccactgcactccagcctgggcaacaagagtgagaccctaactctaaaaaagaagaggtgaggatagacagagactccgaagaggcacaggtaggaaggccatgagaagacacaggcagagactagagcaatgcagccacaagccaaggcgtgttggggtcaccagaaactggaagagacaaggaaggatcctcccctggaggcttcagagggagcatggcactgctgacaccttgattttggactctgacctatagaactgtaagaggataaatttctgttgtttttatttattttttttaatttttttgagaaggaggctagctctgccacccaggctggagtgcagtggcacaatctcagctcactgcaactcctgcctccgggttcaagctattctcctgcctcaccctcctgagtagctgggattacaggcacccgccaccacacctggctagttttttgtatttttagtggagacggggtttcaccatgttggccaggttggttttgaactcctgatctcaaatgatccacccgccacagcttcccaaagtgctaggattacaggtgtgagccaccgtgcccagcctaatttttgttgtttttaagtcaccaagtttgtggtaatttgttacggcagccctgggaaatgaattcagtctgcctgtgctgaaaccagaatgtagccctcttttcaatcaagctctctgaccacaagaatacagtttactggggttcgaaggcctggtcaaaagagtctaaatgtgaattaaggggtcacatagcaggtttttaagtttgaaaaaagtactgccttgatgacccagaaactccggtttaaaaaaaaaaatcaaggccaggcgtggtggctcactcctgtaatcccagcactttgggaggctgaggcaggcggatcacctgaggttgggagtttgagaccagcctgaccaacatgcagaaaccccatctctactaaaaatacaaaattagccaggagtggtggcacatgcctgtaatcccagctactcgggaggctgaggcaggagaatcgcttgaacccaggaggcggtggttgtggtgagccgaaatcttgccattgcactccagcctgggcaacaagagtgaaactccgtctcaaaaaagaaaaaaaaaaaaatcaagggtccccaataatttggtaagctattcagagaattctgagtcttagagctaggaaggcagagatgacctagcacagtccttgcctaatacagtagatataaattcattctcccatgcttaggtcagaaatcatcctacaatttgatttttgttctaaatcaaatgacatcccattaggcctccactactttacaaagtaaatgagaaattccaaaactgattactcctggggatgctttccctcttgtctggttactgtaagaatttaagcttgctcaattcaaaaaccaggaaggcctccccagcactttgggaggccaaggcgggtggatcacctgaggtctggagctcgagaccagcctgacccatgtggcgaaacccctgtcgctactaaaaatgcgaaaattagcctggcatggtggtgcacgcctgtaatcccagttgctcgggaggctgaggcaggagaatccgggagacagaagctacattgagccgaggtagcaccactgcactccagcctgggcaacagagcaagactcaaaaaaacaaaaaccaggaaggggcctggccttcaggctgcatgggcacaggccagcccttgggtgtctattagaagtgggtggccccagcccctctatgccaaacctggtctgctgcttcggaggggcatacattgatcccaccatatctgaagctctctcaccccctttctgaacctaggggctgtgtgggagggcggcacacatccctgatgatgcagagtgtgcaggcactaactccttccccagggttgagagtaagcaattccctcctttgcaatggagctcggcctcttctctttccagcctcccacaacatctgcctcccttaataaactgctcatttcacacaactccaggggtagaagacagagcctccccataacttcacctctctgcccttatcatgtacataacttcacctctctgcccatatcacatagctctttaagaaagggcgatggggcacagaaacataaagacttcttggaatgaaagagggaaaaatatgtttgttttatttcatttatttatttttttgagacggagtctcgttctgttgcccaggctagagtgcagtggtgcaatcttggctcactgcaagctccgcctcccgggttcaagcgattctcctgcctcagacttttgagtagctgggattacaggtgcgcacacccggctaatttttgcacgtttagtagagatggggtttcactatgttggccaggctggtctcaaactcctgatttcgggtgatctgcctgcctcggcctcccaaaatgctgggattacaggcatgagccatcgcacccagcctaaaaaaatacctgtttgttcatttgtttttgagccatccataacagtaggaataccaaacaaacagctcaataaatcatgctccacattattcagtggaagagtcctgaggtcctggttctctgtagaggttctttcttggatgcattgatacacaatggcctcatcttggttccgtttgcctgcgaggtctttagatattttcttgctcaaagtaactggaaatactctaggacttaacttttgaaaacgacagaatggtttggtgttttcagatgcatctggaaaaaggaagtgaagatggctcccagcagttgtcttcatttaaattctctttgagtagcagagctgaatgattctattacaaaccccaggattccaaggaaacagctttgacagtcagttcatccctttacaggcaaaacaggtagttcataaacatacacatttcagcatgataccatctcagaatacgcagtatctaatgcacctccagcaaatgctggtgtaactactataaccgatagaggtttctgtttttattttgagacagggtctcactctgtcgcccaggttggagtgcactggcgcaatctcggctcactgaaacctctctgcttcccgagttcaagcgattctcatgcctcagcctcctgagtaactgggattataggcgcatgccacctccagctaatttttgtatttttagtagacacggggtttcactattttggccaggctggtctggaactcctgacttcaggtgatccatccacctcggcctcccaaggtgctgagattacaggagtgagccaccacgcccggccccattacagcgttttaatccagattggaaatgctttcacagaaggagcatttgactgtaatactggccagtgttttcctccacgcgaaacacttgccataaacattcacaaatagcaggggaatttaaaaaccaggaaggaaatgagtgataatgatctcatgggaaggaacagaacttcctcacaaagacataaatgttcagtactcacttgtatcccatccaccctctgcctggcaactgagtgtgcttagactggtgtcaaatagtgaacaatttgcctgaatagatcatcaaagcttcagtagtaactggagtttagcaaacttctttcaacgatacagtgtatctcaaaaaccagagaagtatgtacataattaaacattttaggttcaaattctgaaaaaaaaatggtccaggccaaaaatgaagttaaattccaaataagaaaaggggccgggtatggtggctcacgcctgtaattccaagttttgggagaccaaggtgggcagattacttgagaccaggagttcaaaaaccagccggggtaacatggtgaaaccctgtctctacaaaaagtacaaaaattagccaagtgtggtggcgcgcacctgtggtcccagctacctgagaggttgaagtgggaggatcacctgagccccggaggtcaagggtgcagtgagccatgatcgtgccactgcaatccatcctgggtaacagagagagaccctgtctcaaaaaatggctgggcacggcggctcacgcctctaattccagaacttggggatatccctgttatgtcttaaggttatctgttttgccacacaggaattatttgcatctctagtggagaaatatctacaaatgaatctcagattctacagaattttaaaaaagcccagaggtgaacagatcacttaaggtcaggagttcaaaaccagcctggccaacatggtgaaaccccgtctctagtaaaaatacaaaaattagctgggcgcggtggtatgtgtctgcagtcccagctactgggaaggctgaggcaggagaattgcttaaacccaggaggcagaggttgcagtgagccaagatcgcaccactgcattctagcctgggtgacaaagcgagactttctcaaagaaaaaaaaaaaagaaaaagaaaaaagaaaaggactctcttctctcttgaaaacatttataatgtagaggttataatgcagaggaaaagtctttgattcagggaggccaaaaaactgtccatcaggaaagattttaccaggtcacacttgttaccttgctgaattttctagaaaacaagtctgacctctggccttataggcacagaaacccagtgtttccaactcattaacagcgtatcagtctttcacaaatggatatccattatccatccactggcgtataaaaccagaatgacagcctggcatggtggctcaacccagtaatcccagcactttgggaggccaaggcaggtgaatcacctgaggtcaggagtttgagaccagcctggccaacatgttgaaaccccatctctactaaaaatgcaaaaaagattagctgggcatggtcgcgtgcccatgtaatcccagctactcaggaggctgaggtgggagaattgcttgaacccaggaagcagaggttgcagtgagccaagatcgtgccactgcactccagcctgggcaacagagtgagaccccatctccaaaacaacaacaacaacaacaacaacaacaacaaaccggaatgacctcacacctgtaatcacagcattttgtgaggctgaggcagacagatcacctgaggtcaggagttcgagaccagcctggccaacatggagaaaccctgtctctactaaaaccacaaaaattagccaggtgtggtgttgggcatttgtaatcccagctactctggaggctgaggctcgagaattgcttgaacccaggaggcgcaggttgcggtaagctgagattgtgccactgcattccagccttggtgaccgagcaacactctatctcaataaataaataaataaataaataaaaccagaatgaccatttactgatcactaataagaaatctaacagtcatccaggaaaacatatgaccaacccatcctctcctgacagacatgtaagatggcaaaaaagtacccaaaacttgaaaatagataaaagagattactagcccggatgtggtggctcatgcctgtaatcccagcacttcgggaggccgaggtgggcagaacacctgaggtcaggagttcaagaccagcctgaccaacatggagaagccccatctctactaaaaatacaaaattagccaggcatggtggcactcgcctgtactcccagctacatgggaggctgaggcaggagaatcgcttgaacccaggaggcggaggttgcggtgagccgagatggtgccattgcactccagcctgggcaacaagagtgaaactcagtctcaaaaaaaaaaaaaaaggaggttactggagttattttcagtgtaatgctgggcttgactttctactgtctgggctattttaaaattctgtaggatcggatgggcaccgtggctcacgcctgtaatcccagcactttgggaggccaaggcgggcggatcacaaggtcaagagatcgagaccatcctggctaacacggtgaaaccccgtctctactaaaaatacaaaaaaattagccgggcatggtggcaggcacctgtagtcccagctacccgggaagctgaggcaggagattggcgtgaactcaggaggcagagcttgcagtgagctgagatcgcatcactgcactccagcctgggaaacagagtgagagtctgtctcgaaaaaaaaaaaaaaattctgtaggatcagagattcatttatagatttttgtcctctagacgtgcaaataattcttatgtggcaaaacagataaccttaagacgtaacagcgtatggccctgttggactttgatatttttatctaactagcaatctatcctcatataaatatcctagcttctcaaataccctttgaactaattttaacatcttactggttaattcattaattaataagttgaataaaatatttgatatgtatgtattttatacttgcatcagtcatgacattatcttttaaaaaaaaataaggtgtgctgggcgcggtggctcaggcctgtaatcccagcactttgggaggccgaggcaggtggatcacaaggtcaggagttcaagaccagcctggccaagatggtgaaaccccgtctctactaaaaatacaaaaattagctgggcgtggtggtgggcgcttgtaatcccagctactcgggaggctgaggcagagaattgcttgaacccaggaggcagaggttgcagtgagccgagatcacaccactgcactccagcctgggcaacagagcgagactctatctcaaaaaacaaaaaaaaaatttaggtgaaattcatgttacagaaaattaaccattttaaagtgaacaaatcagcagaatttagaacatctacagcgttgtgcaaccaccatttctatctagttccaaaacactttcactacctcaaaaaaaaatcctttatccattaagcagaaggaatttcattccctcctccccctagcccctggcaactcccaatctgctttttgattcagtgaatttatctattctggatattttatacaaatggaatcataccatatgagacctcttgtgtctaacttctttcacttgccataatgtagacacttactttccccttccccttccccttcccctttcccttcccttcctttcctttcttttccttttctttccttttatttcctttttcttacagcatcttgctctgttgtccatgctggagtgcagtggcatgatcttggctcactgcagcctccacctcccaggcttcagtgatcctctggcctcagcctcctgagtagctgggattacagatgcacaccaccatgctcagctaattatttcacattttttgtagagacggggtttcgtcacattgcccaggctggttttgagctcctgggctcaagcgattcacccacctcagcctcccaaagtgttgggattacgatcatgagctaccgcgcccagccagcataatgtttcaagtttcactctccttataacatatatcagtattgctgagtaatattctatgacatggatacaccaaatttttttttttttttttgagacagagtctcctctgtcgccgaggttggagtacagtggcgcaatcttggctgactgcaacctccgcctcctgggttcaagcgattctcctgcctcagcctcccgagtagctgggactacaaccacgagccaccatgcccagctaattgttgtatttttagtagagacggggtttcactacgttggccaggctggtctcaaactcctgacctcaagtgatccgcccacctccatcccccaaagtgctgggattacaggcgtgagccaccgcacctggccccataatctaaattttagaggaagaatttatttccacactcttactgtaatccctaggtattgacagcagaagaaaatcacattattcttctaagatttgcattccaaaaggtgaaggatatgtggtcttctgtagcaggtccattaagcgggaatattgaatgaaacagctgcactgcactctatatacaatggaaagcaatggggcagcaccaggaaaccagctgtttagtattctgtagtgaggagctgtattgtgcattcagtagtagctgacatgatgtgcattttaagaagaattttattcctttatttatttatttttgagatggagtcttgctctgtcgccgaggctggagtgcagtggcttgatctcggctgattgcgacctccacctcctgagttgaagcgattcttctgcctcagcctcccgagtagctgggattacaggcatacaccaccacgccccggctagtttttgtattttcagtagagatagagtttcaccatgttggccaggatggtctcgaactcctgacctcaggtgatttgcccacctcagcctcccaaagtgctgggattacaggcatgagtcaccgtgcctggcctgttgctttttcttgaaggtgagttagctcttttaaagttacttaattcttaaaatcctcaaaaattctaattgaatctaatgctaaaagctcgatcaaataaaattagtctacatcatatttctttaatcgtttttagtttctgtacttgcaaatgacatttaagcatttaaaaaagaaaatcattatgaaactagaaagttttccctcatagttcaagaaaaatgtccaaagttcaagttaaggtattaaattgaacggggtactaaatttagagatattagatttcttttttttttttttttttttttgagatgaagtctcgctctgtcacccaggctggagtgcagtggcgcgatctcggctcactgcaagctccgcctcccgggttcacgccattctcctgcctcagcctcccaagtagctgggactacaggtgcccgccaccatgcccggctaatttttttgtatttttagtagagacggggtttcactgtgttagccaggatggtctcaatctcctgacctcatgattagcccgcctcagcctcccaaagctctgggattacaggcatcccgaagcaccgctcctcgccacgataatagatttcttaaagacaaagatgatttttaccatagagttggtacttgccacacattaaataaggctgtatatatggcaatacgaaaaaattaagaaaaggtgcttctgtgtcaactttcttcctcctagtaggtaaagctgtccttattgagaacattgtttcttttttgaaatggagtctcactccatcacccaggctggagtgcagtggcacaatctcggctcacctcaacctctgccttccgggttcaagtgattctccagcctcagcctcccgagtagctgggattacgggtgcatgccaccacgcctgctaattctttgtttttttagcagagatggggtttcaccatgttggtcaggctggtctcaaactcctgacctcaggtgatccacctgcgtcggtctcccaaagtgctgggattacagcgtgagccactgtgctgggccgagaacattatttctacaccctagtttccgaagaaaagttggcccagatgtgcttttctggatacgtaaataatgtatgtttatttagctatttttattattcataccgaataatccctttttatttgtacccagtgatgccaaatgagctttcaattttttggttttaaaatcctaaaacgtccttaatgggttttggaccgaagaccatctattgagaaaataggagcgccaactttaatcataattgctcaactgggactcatgcacacgatacatacccaatgtggctgaaatgacccaatagcgttggtcacgagaaatgcctcttctgttggctcttgctctccttggcaatcggtacaaaaagataggagtttttgaggaattgtctttacgtttagtggggtaagatttaaaacagtaaggctgggcacagtggctcatgcctgtaaccccagctctttgggaagccaaaacgggaggattgcttaaacccaggagttcaagatcagcctgggcaacatgacgagatcctgtctctacaaaaagttaaacaaacaaacaaaaaacacagccaggcatgatggcacatggctgtagtcatagctactcaggaggctgaggcaggagcatcacgtgagcccagaagttcgaggcttcagtgagcaatgagctctccagcctgggtgacagagcaagaacctgtctctaaaataataataatcggctgggcacgttggctcacgcctgtaatcccagcactttgggaggctcagaagggcaggctacctgaggtcaggagttcgagaccagcctggccaaaatggtgaaacccagttcctactaaaaatacaaaaattagccgggcatggtggcgtgtgcctgtagtcccagctactcgggaggctaaggcaggagaatcgcttaaacccaggaggcggaggttgcagtgagccaagattgtgccactgcactccagcctgggcgacaaagcaagactccatctcaaataaaataaaataaaataataattatcataataaaatagtaacagctgaggccgggcgctgtggctcatgcctgtaatcccagcactttgggaggccgaggcgggtggatcacgaggtcaagagatcgagaccatccaggccaacatagtgaaaccccgtctctactaaaaatacaaaaaaatagccgggtgtggtggcaggcgcctgtagtcccagctactcaggaggctgaggcaggagaatggcatgaacccaggaggcggagcttgcagtgagccgagatcacgccactgcactccagcctgggcaacagagtgagactctgtctcaaaaataaatacataaataaatacataaataaataaattaaattaaattaaatagtaacagctttaccaggaattgtccctgcctggtctaccacatcactcctttgcacatacatatccttttggttttaaaatatgcatgctgaatgaaaggtacatgaaaggtctttgcactatctgtgcaatttcctctaactataattatttccaaaaaaagaagccaaaatgcagatatacccaaaataattgaaaacaggaccttaagcagatacctgtatgtccatattcataacgtcactagtcacaatagcccaaataaaatggctgggcatggtggctcatgcctgtaatcccagcactttgggaggccgaggtgggcggatcacctgaggccaggagttcgagaccagactggtcaacatggtgagaccctgtctctactaaaaatgcaaaaattacccaggtgtggtggcatgcatctgtaatcccagctactcgggaggctgaggcaggagaattgcttgaacccaggaggcgaaggttgcagtgagccgagattgcaccattgcactccagcctgggtgacagagcgagactccctctcaaaaaacaaacaaacaaaaaagcaaaaacccaaaaaagaaaacaacccaggtgaccatcaacagatgaatgaacagaagtggtacgtgcatataatcgaatgctcttcagcctttaagaggaaagatgtctgacacaggttacaagggatgaaccttgaaaacatgatgctaagtgaaagaagccagacatgaagaggcacttactgtctgatcccatttacacaaaatatctagaataggcaaatccatagagactgaaggtagaataaagattgccaggggctggggaaagggggaaatgggcacttactgcttaatggttacagagttcctgtttggggtgttgaaaaaagtttagaaaatagggccgggcgcggtggctcacgcctgtaatcccagcactttgggaggccgaggcaggtggatcacctgaggtcaggagttccagaccagcctcaacatggagaaaccccgtctctactaaaaatacaaaattagctgggcgtggtggtgcatgcctgtaatcccagctactcaggaggctgaggcaggaattgcttgaacctgggaggtggaggttgtggtgagctgatggtgccattgcactccagcctgggcagcaagagcaaaactccgtctcaaaaaaaaaaaaaaaaaaagtttagaaaatagatagtggtgacgattgcacattttgaatgccattaatgccattgagttgtgcacttaaaaagggttaaagaagggtctggatgtggtggctcacgccagtaatcccagcacttttggaggccaagctgggcggatcacctgaggttgggagttcaagaacagcctgaccaacatggagaaaccctgtttctactaaaaatacaaaaattagtcgggcatgttggcaggtgcctgtaaccccagctacttgggaggctgaggcaggagaatcgcttgaacctgggaggcagaggttgcggtgagttgagatcacgccattgcactccagcctgggcaacaagagtgaaactccatctcaaaaaaagaagagaaaaaaaagagttaaagtggcaaattttatatttatttatttcacggcaagtttgtaaaaagtcaatatacagagaatttttgttttgagacagggtcttgttctgtccccccaggctggagtgcagtggcatgataacaggtcaccacagcctcaacttcctggcgatataggagttaagaagcaattactggcctggtgcggtggctcatgcctgtaatcctagcactttgggaggcaggcagatcacttgaggtcaggagtttgagaccagtctggccaacgtggtgaaaccccgtctctactacaaatacaaaaattagccgggcatggtggtgcacatctataattccggctactcggaaggctgaggcgggataatcgcttgaacccgggagacggaggttgcagtgagcccagatcgtgtcactgcactccagcctgggagacagagcaagactctgtctcaaaaaaaaaaagaaaagaaaagaaattacttaggcagatagtgagggtacaggagtccttggaaggttttccttttagtaaaaagcacccccaaaatcattttcttttctaacaaagagcagcctgtaaaatcaagctgcagacatagataagcaagctggaagcttgcacgggtgaatgccggcagttatgccaataggaaaaggctacctgggaacaagcaggctcaaaatggtggcttcatcttcccttctctttgccaaaccatgagtacaataaggagaggacaaaagggatccccggccaggcaaagatcctatttgcataataagattagggtggggcaaccagccttcccagcacactatgtaaatgtcacacctgatggaaccaatctgtgggtcctatgtaaatcagacaccacctcctcaagcctgcctataaaatatagtgcagtccctggagggcatggttttccttttggaagcccctttctctggcaagggagaaagctgttctcctttctctctttttttttttctattaaagcttccctcctaaactcacttctcatgtgtgtccatgtccttaatcttcttggtgtgagatgacaaaccctgggtatttaccccagacaatgactctgcttcactgggctcaggtgatcctcccctccctagtagctgagattacaggtacataccaccatgcctggctaattttaaatttttttgtagagatgtagactcaccatgttgcccaggctggtctcaaactcctgggctcaagccatctgccagcctcagcctcccagggtcctaaggttataggcatgtgccactgcaacccacccagtgtttaattttcaaaaggtgagcagctcataggtgaatttaaaaccttaacttagttgttaacacaggatgatgctatcatcaaagaaatgataatgtgtcttaaaaacattgtattgtaaagtttattcatacataattaaaacagaaaattatccgcatagctatcttaaccctccttttactatattaatgctggactgaccaaaattattttttccatataatgaagacaacttctatttccaatttaatgagtgggtgtatgaggaaaagaagcaatttgctatagctcagattacagtgctttttagttctttattattattattattattatttgaaacagagtcttgctctgtcacccaggctggagtacagtggtgcagtctcagctcactgcaacctcaatctcctgggctcaagcaactctcatgcctcagcctccggaattgctgggattacaggcatgtgtcaccatacccagctaattttttctatgtttagtagagatggggtttcgccatgctgcccaggttggtctcgaactcctggcctcaagtgatctgcctgcctcagcctcccaaagtgctaggattacaggtgtgggccaccgcgcccagcctaagttctttaattccaacttcttaatatctctggtgtgtatccttgtttctccaaactaacagccactgcctttgtccagcctaatacagctaattttgtaaaatcaagtttattgacatataattcacatagaataacattatttttaagtgtacagtttcatgagttttgacaaatgtaaagagttgtaaaatcaaggtttacaaaatctgcatttggtatcagggtgacgtcaccgagtcctttcctggggcagccttccatggctcttggtacataggtcaacacagcattcccaggtgtgagatgtactatcaccagaaccgaaggggcattgtgtttcttttgtcatggggaagttgtgagaaataatattttgggctgggtgcagtggctcacacctgtaaccccagcactttgggaggctgaggaggtcaggagttcaagaccagcctggccaatgtggtgaaaccccgtctctactaaaaatacaaaaattagctgggtgtggtggtgggcacctgtagtccaagctactcaggaggctgaggcaggagaattgcttgaacctgggaggtggaggttgcagtcagctgagatcgcgccattacactccagcctgggccacagagtgagactccgtcccaaaaaaaagaaaaaaaagaaagaaagaaaaagaaaataaacagtattttgatctttactttgtaaggaatgtcccagcatgcttcaggccaggccctctaaaaccttcactgatctgccaggccctagatcttcacagagtttctctctggctctttggagcatgagtcttaccaagtccctctatatacttgtcacctcttgttcattttgtctgattcacctcctgtcatcaatattgtggcctagtgggatgctctgcaggatgtccagatggtccagctgcttttgggatgtctcctgacagaagaggaagagttaacagagcctggagaaaagctgtaatactattgtccatcctaagtggatgtcaactgattctgataaggagagaaaagaatgcatttgttaggccagtagcacctatcacaggcctggggccatgtcagtctcttttagcagagacaccttaagtggcatcacagctgcaattgaggctaccacttggtgtgtgttcagcagttcactgtcactctctagaccctgtctggttttggtaggggttagactggaaaactgaaaggacacagaatggggattgccacctgtgcattcattctgtctttaagggtgccgcttatctctgcccttcctcgcaggatgtgatggtgttttcaattttctgtttggccagtaaagagtaagaagccgggggggagggatagcattgggagatatacctaatgctagatgacacattagtgggtgcagcgcaccagcatggcacatgtatacatatgtaactaacctgcacaatgtgcacatgtaccctaaaacttagagtataataaaaaaaaaaaaaaaaaaaaaaaaaaaaaaaaaaaacaaccccatactcagccagcagaaagaggagaagcagctggacgttgaagactgcgtctggatgtcagagagaagtggcttgacttcagacggacagcttgacagggtaatctcagagaataatctggctggagatggccggatttcaggggaagactaccttcccgtcccctccccttttcacctccccttcctgctgagagccactttcactggcaataaaatcccccgcatttaccgtcaaaaaaaaaaaaaaaaaaaaaaaaaaaaagagtaagaagcgggttagaggcttctcgataggctttctcactatgatatgtcacaggttaagagactaatgtgggggttcgccaactccaagtaggtccatcgaatgatatatttgggggttgagaaatgaccatggacccctgacacactgtgagctggttgtgactcaagacttcatttctttctgtcttttttttttttttttgagaccgagtctcactctgtcgccaggctggagtgcagtggcgcaatctcagctcactgcaacctccgtctcctgggttcaagtgattctcctgccccagcctcccgagtagctgggactacaggcatgcgccaccatgcccagctaatttttgtatttttagtagagacagggtttcaccatgttggccaggatggtctcgatctcttgaccttgcgattcgcccacctcagcctcccaaagttctgggattacaggcgtgagccacagtacccgaccaacttcatttatttcttggtctccacatattaacatcctctaatgggcagttgggggaggggtagtgatgacaatttgggtcctaggatatagcaatgtgaactcagatgctgtgtccaacagtccttggaatgctggggtgtagccctttgcctggcggatgctcacccaagtgaatggtcatagtcctttaaggagaaggaatggggaatcattactacgcacacttgctgaaggctgcagtttccttcctcccaggacccagtttctcctccaatctgggtataaaaactggctccagttcagaaactggccaaggcatcatgacaatctattggggtgctttaattttttctgactgtatcgattaacaccttactgattgtccatttatcttgactctagagaagccatgttttgttaaccatctccatagttctgtgcacatcaggctccctttgccaccattctcaccttgtcactcatgacttttgtgcccatcttgttattctttactttttttttttttttttttagatggagtctcactctgtcacccaggctggaatgcagtggcgcgatcctggctcactgcaacctccgcctcccaggttcaagcaattctactgcctcagcctcctgagtagctgggattataggcgcccgccactacgcctggctaatttttgtatttttagtaaagaccaggtttcaccatgttgattagcctggtcttgaactcctgacctcaggcgatccgctcatagcctcccaaagtgctgggattacaagcatgagccaccatgcccggccccatcttgtttctgatgattaagtgtcctggcctctattatactagaatcctatcatttccatttctaccagggagctgagttctgtgactgcatctcctgctggaagccctgacctttagaggacagccatcagagagctgctgaatgatgtaagggtatttgtcaccagagctttcctcattgctttgatcaatggcatgtcttctgggccctcttgcagaacagtcatctgatgggttttctggccttatgtggcacatccactcagtatgcccatttccctgagtcttttcatctttcttccaccctttgccacagcagttctagcatttcttactgaaggggtgggttgcccctccacacctgtgggtgtttctcgttaggtggattgagagacttggaaaagaaagagacagagagacaaagtatagagaaagcagaaagggggcccaggggaccggagttcagcatacagaggatccacaccggcctctgagttcccttagtatttattgatcattattgggtgtttctccgagagggggatgtggcaggatcataggataatagtggagagaaggtcagcagataaacacgtgaacaaaggtctctgcatcataaacaaggtaaagaattaagtgctgtgctttagataggtatatacataaacatctcaatgccttaaagagcaatattgctgcccgcatgtcccacctccagccctaaggcggttttcccctatctcagtagatggaacatacaatcgggttttacaccgagacattccattgcccagggacgggcaggagacagatgccttcctcttgtctcaactgcaaagaggcattccttcctcttttactaatcctcctcagcacagaccctttacgggtgtcgggctgggggacagtcaggtctttcccttcccatgaggccatatttcggactatcacatggggagaaaccttggacaatacctggcattcctaggctgaggtccctgaggccttccgcagtgttttgtgtccctgggtacttgagattagggagtggtgatgactcttaaggagcatgctgccttcaagcatctgtttaaaaaatcacatcttgcacagcccttaatccatttaaccctgagttgacacagcacatgtctcagggagcacagggttgggggtaaggttacagattaaaatggggtcccttatgtctactttctatacagacacattaacaatctgatctctctttcttttccccacacttacttcacttagtggggcttgctgcttcctccagacttccaaaggtcatcctaacagcatattagcacctgctctccaggtccttgctggggtcttaaatcctgtatctcaggagagtgcttccatattgataagttatttcttctccaactgtatgtttccacccctgttgtggtttaaatgtgtccccccccaaagttcatgtgttggaaacttaattgccattataacaatattaagagatggggcctttaagaggtaattatgccatgagggctgtgccctcatgaatggattaatgctgttattgtaggaggggattagctattgtgggagtgggctctccataagaggatgagttcacttgattttctctctttcccttgcacctgcttgcccttccacttttctgacatattatgaagcagtacactttgtatgccagaagctgctgttacgcccttggacttcccagcctccggagtcttgagccaaataattttttataaattacccagtatgtgatattctgttatagcaacagaaaatgggctaagacaaacttgtcaggcctctgagcccaagccaagccattgcatcccctgtgacttgcacgtatacatccagatggcctgaagtaactgaagatccacaaaagaagtaaaaatagccttaactgatgacattccaccattgtgatttgtttctgcctcaccctaactgatcaatgtactttgtaatctcccccacccttaataacgtactttctaatctcccccacccttgagaaggttctttgtaattctccccacccttgagaatgtactttgtgagatccacccctgcccacaaaacattgctcttaacttcactgcctatcccaaaacctgtaagaactaatgataatccaccaccctttgctgactctcttttcggactcagcccgcctgcagccaggtgaaataaacagccatgttgctcacacaaagcctgtttggtagtctcttcacatggatgcgcatgaaacctttgttccagcatcctcaggatccaatcccatatatacttttctggtttttgctggctagatcctgtagttcctttagagtttggtctatttcccaagtgaatttccctagccaattattttgtaattttaaccctagttattggtctggtgattaggaggggaggtggaggtagatcacgttgttctacctcctcttttactaatccttattagttgttcacgttgttcacgttgccttataaggcagacatctctgtagaatcatcttcaggcaaggtaagggtattctttaacacttctataaaatctaaggtttcagggggatcttgacttcaagattttttttttttttttttttttttttttgagactgaatcccaggctggagtgcagtggcgcgatctcggctcactgcaagctccgcctcctgggttcatgccattctcctgcctcagcttcctaagtagctgggactacaggcacctgccatcatgcctggctaattttttgtatttttagtaaagacgggatttcgccatgttagccaggatgttcttgatctcctgacctcatgatctatctgcctcggtctcccaaagtcctgggattacaggcgttagccgctgcacccggccaacttcaagattcttaagtacatggatccagttgtctccatcccttatctcagagtccccctcttttccaatccagttaggggcctgacattagcataacagaccaggttattgaggttgactgttcgacctcccctggagctccgctactctggcaattcctaggccagatcctcaaagctactgacacactgtagatgagtctcttaataaggtgccaaggaggcccctctggttttcacacttaacccccagttggtgattcatcattctaagcctttgtccttctcctaactactgagcgccccaagaaacaaccaaccatccaaattcattatcttttgactatttccacaatatttctttttttttttttttttttttttcctgagacagaatttcactcagttccccaggctggagtgcagtggcatgatcttggctcactgcaacctctgcctcctgggttcaagcaattctcttgcctcagcctctggagtagctgggattacaggcacccaccaccatgcccagctaattttttgtatttttagtagagacggagtttcaccatgttggccaggctggtcttgaactcctgacctttggtgatccacccccccccgaccccttggcctcccaaagtgctgggattacaaagcgctgtaagtgtgagccaccgcaccgggcctatttccacaaaattacttaaaggtcattcattcccttctgatatggtttggctctgtgtccccatccaaatctcatcttgtagctcctataattcccatgtgttgtgggagaatcctggtgagaatcatgggggcaggtctttcccgtgctgttcttgtgatagtgaataggactcacaatatctgatggttttaacaacaggagtccctccccacaagccctctctttgcctgccaccatccacgtaagatgcaacttgctccttcttgccttccaccataattgtggggcctccccagccatgtggaactgtgagtccaattaaacctcttactttcttcttttttttttttgagacagggtctcactctgctgtccaggctggagtgcagtggcacaatctcggctcactgcaacctccacctcctgggttcaagcaattctcctgccttagcctcctgagtagctgggattacaggtgcatgccaccacacccagctaatttttgtatttttagtagagacagagtttcaccaggttggccaggctcatctcaaattcctgacctcaagcgatcagcctgcctcggcctcccaaaatactgggattacaggtgtgagccaccacacccagcctaaacctctttcttttgtaaatttcgtagtctcaggcatgtctttatcagcagcgtgaaaacagagtaatacagcaaattggtaccagtagagtcaggtgctgctgaaaagacacccaaaaatgtggaagcgcctttggaactggtaacaggcagagggtaaggatatgtttctacccctgttgtggtttatgtttcacacagtttggagggctcagaagaagacaggaacatgtgggaaagtctggaacttcctagagacttgttgaatggctttgacaaaaatgctgatagtgatatgaacaataaggtccaggccgaggtggtctcagatggagatggggaactggatcaaaggtgactcttgttgtattttaacaaagcgactggtggcattttgcccttgccctagaaatttgtggaactttgagcttgagagagatgatttagggcatctggtggaagaaatttctaagcagcaaagcattcaagagatgactgttaaaggcgttcagttttaaaagggaaacacggcataaaagtttggaaaattcacagcctgataatgcaagagagaagaaaatcccattttctgaagaaattcaagctggctgcagaaatttgcatgagtaacaaggaagtgagtgttaagagcatgtcagagacctttgcaacagcccctcccatcacaggccctgaggcctaggagtaaaaatggtttcgtgggccagacccagggtccctctgctgggtgcagtctagaagcttggtgccctgcatcccagctgctccagccatcatgaaaaggggccaaggtacagctagggctgttgcttcagacgctgcaagccccaagccttggtagcttccatgtggtgttgagcctgtgggtgcacagaagtcaagaattgaggtttgggaatctctgcctagattgcagacgatgtatgtaaatgcctgggtatccaggcggaagtttgctgcaggggcagggccctcatggagaacttctgctagggcaatgcagcaggaaaatgtggggtcagagtccccacacagagtccctactggggcatggcctagtggggctgtgagaagtgggccactgtcctccagatcccagaatggtaaatccactgacagcttgcaccgtgcacctggaaaagccacagacaatgccagcccatgaaagcagccaggaggggggctataccctgcaaagccgcaagggcagagcttcccaaggccatgggaggccacctcttgcatcagcgtgacctggatgtgagagatggagtcaaaggagatcattctggagctttaagatttgaccatcccgttggattttggacttgcatgggtctgtagcccctttgttgtggccagtttctcccatttggaatggctgtatttatccaatatctgtacccccattgtatctaggaagtaactgacttggttttgattttacaggctcataggtggaagggacttgccttgtctcagatgagactttggaccgtggacttttgagttaatgatgaaatgagctgagactttgggggactgttggaaaggcatgaatggttttgaaatgtgaagatatgagatttgggaggggtcagagatggaatgacatggtttggctctgtgtccccacccaaatctcatcttgtagctcccataattcccaagtgttgagggaggaacctggtgggagatgactgaatcatgggggtaggtctttctggtgctattctcgtgatagtgaatgggtctcacgagatctgatggtttcaaaaatgggagtctcggctgggcgcggtggctcatgcctgtaatcccagcactttgggaggccaaggcgggtggatcatgaggtcaggagtttgagaccagtctgaccaacatgttgaaacccagtctctactaaaaacacaaaaattagctgggcgtggtggagcacgtctgtaatgccagctactcaggaggctgaggcaggagaattacttgaacctgggaggcagaggttgcagtgagctgagatcgtgccactgcactccagcctgggtgacagagtgagactccatctcaaaaaataatagtaataataataatgggagtctttctgcacaagccctctctttgcctgccaccgttcacataagatgtgacttgctcctccttgccttccaccatgattgtgaggactccctagccacatgcaactgtgagtccagttaaacctctttctttggtaaattgcccagtctcagatatgtctttatcagcagcgtgaaaatggactaataatatacctttcatcagtcatcctagttcaccagcagttttaacaactgcacccctactatatgctgggggctgtacatgctccacctattaccagtgatggggttctcactgccagctggccagttggtaagctggctatgaaatccagttttttgagtcagctttctcagaccacttccagcaccaactatcatagggacctagcttccatagaccagcttcccccaaaagctgactctgaaatggatatttgcacagagagcttattgaggcttgcttgggagatcagctcccataagcaagtgaaggaaggaggattgggaagagggaggagttgaaccacaatatggttgtaacagaggcctcagtcaatcttgcgggaattctccagagctaaaatggcccttcagagttgtcccaaattgtagcaagaggaccaggacttcatattcttatatcaatttgtcattggaagggaggtagctctcttcagctgaaggtgatcacggggagtggaggaagcgggtgaggacacactcagctatgggtcattaacactctcaggactgtttttcagtcttgaaggagactagctgggtggcagaccacagtgttcactaaataaaatgaaagaaatatgggaaagtggtagaatatctccttccagtgagttagaagtatctgaggggcggagagtggaagaactacaaagggaagctgagtcctatttcttaaacagggcatttcagactgttattaaactgttcttcatgttggaaaacttgaagaaaccaatgtaatcttggaagctacaatttgggaaatgttttagagactttgagtgtttactttcatttaattaaattattttaagagacagtcttgccctgttctccaggctggagtacagtggtgcgattgtggcaggccaggtctcactaacgcaggcctctgtaacaactgtttcagcactgactgagtggtgaagttcaatattaaaagctgagagagccaacgcccttctacaaaggctggaacataataaaagcccatcaagagttttgcccaggcccttcctaggccttaaagcatgacaagataacgcagaaattcttaacagtacccgtttagaattaaacaagctttattcggggggtgggggggcgggaggggggcgctgaagaaactccccagacctccacaaacaagtttattggggcatctgaagaaattccccaaacctccgtgatttagcaggagacaagataagggtagtcaccccagcacgtggacccatttagattaagtaaatttactgaggctccagaaggtcttcaggacttagatcttagttaatgattagaagttaatcacttatggccaggcgcagtggctcacgcctgtaatcccagcactttgggaggccgaggtgggcggatcatgaggtcaggaaatcaagatcatcctggctaacaccgtgaaaccccgtctgtagtaaaaaaaaaaacaaaaaaacaaaaaaaacaaaaaaaaaacaagaaattagcagggcatggtggcaggtgcctgtagtcccagctactcgggaggctgaggcaggagaatggcgtgaacccggaaggcggagtttgcagtgagccgaaatcacgccactgcactccagcctagagtgagactccgtctcaaaaaaaaaaaaaaaaaaaagttaatcacttatgtctttagatgaatgctacttacacgtagacacagcttagaaggtatatataagctctggaaaactctgtaattttgagttggtctggcgatattttccagacctttaccctgtaccctgttacagaaataaactgccttctttcccaattcatttacatctcgttactgggccgtgagaataagcagccccacctgtggtttggtctgggaacacaatcacagctcactgtagcctccacctcctgggctcaagtgattctgccacctgggccttttgtgtagctaggatcacaggtacgtaccattatgctaggctaatctgagctatagcaaattgttttttccctcccagccattttaaatttttttgtagagatggggatctcactatcttggcaaggctcatcttgaactcttggcctcaagggatcctcctgctttggcctcccaaagtgttgaaattacaggtgtgagccaccatgcccagtctattttttacggtggatatactcttgggaaaaaacttttcagagtaatgtaaggttggacatgaagatagaaacaaaattccagcagggtgtgataatgaagggttgaaaaagattaagcaattcaacaagcacttaagtttctactatgtaacaaatgatggattacaaagataaacatggtccctaatttagtaagaatagcaagataatgaaacttggaaacttcaaagaaatgtcattcagttctttccatatactaaatactaagctccaggctgtgtgcagtggttcatgcctgtaataccagcgctttgggaggctgacgtgggaggatcccttgaggccaggagtttgagaccagcctaggtaatatagtgagaccctgtctctacactcgctctgtctcccaggctggagtgcagcggcacaatcatgactcactgcagcctcaacctcccaggttcaagcaatcctcctgactcagcctcccaagtagctgggattacaggtatgaaccaccacattcagcctctacaaaaaacttaaaaaattagccagacatggtggcacacgcctatactcccagctactggggaggctgagatgggaggattacttgagcccaggagttcaaggctgcagtaagcactccagcctgggtgagaatgagaccctgtctcaaaagcaaaaaaaaaaaaaaaaaaaaaaaaaagccaggcgtggtggctcacgcctgtaatcccagtactttgggaggccgaggtgggtagatcacttgaggtcaggagttcaagaccagcttgaccaacctggtgaaatcccgtctctactaaaaatacaaaattagccgagcatgggggctcacacctataatcccagctactcaggaggctgaggcaggagaatcatttgaaccccggaggcagaggttgcagtgagccgagatcgtgccattgcaccccagcctgggtgacgagaggaactccgtctcaaaaaaaaaaaaaaaaaaaaaaaagggccgggcgcggtggctcacgcctgtaatcccagcactttgggaggctgaggcaggtggatcacgaggtcaggagatggaggccattctgactaacacatggttaaaccccgtctctactaaaaatacaaaaaaattaatcgggcgtggtggcgggcacctgtggtcccagctactcggaaggctgaggcaggagaatggcgtgaacctgggaggcggagcttgcagtgagccgaggttgcgccaccgcactccagcctgggcaacagagcgagactccgtctcaaaaaataaaaacaataaaaaataaaaaaaaataaagctctaagttaggaaaattgtttaatatcctctcaaaaatgccaagaccatttctctgcatcacagaaggcagtatggaagcagactttcaaaccactaaactcctaaaacaacgggctccggatgagcatctcgctgtagctttaccgccacatgtaccttaactgatatccatgtttttttcccctaaacatctaaaacaccaacacatttcagttcttttctagtccttactacccatgttgtcaagaagagtggttctcaaagtgcggtccatggaccagtagttcgggtactgagaacttgttagaaattaaaattcgtgggccccgctccatcccgactgagtgtgaatctgggggtggagcccagcatctgtgtgtaacaagccccgcgcatattctgatgggccttgagatgaagaaccacttgtcaggtgcccaataaagcacggcctaagccaccaaccccaaatcgggagtttaggaggggcaaagtccgtcagctggctttcgaaacatgtgcaaggtgttttgtcaccgcttaaaaggcaggttcagattcatccaaaggatttgaaaacttggtccacacaaaaacctgcacacagatgtttagttttatttgtaattgccaaaatgtataagcaaggtgtccctcaggagctgaatggataaactgtggtacaaccagacaatggaatattactcagcactaaagagaaataagctatcaagccatgaaaagatgtggaggaaatggaaatgcgtattactaagtgaaagaagccgatctaaaaaaaaaggctacctactgtgattccaactatatgacattctgaaaaagggaaaaactatggaaaccgtagactcacaattgtcaggggatttgcaggaagatatgaactggcagagaactgtggggcggtgaagtattatggtagtataatggtggatacatgccattatacatttgtccaaacacacagaatgtacaagaatgaaccgtaaactacggactttgggtgataatggtgtcaaaacaggttcattagctgtaaaaaatgtgccactctgtgggggatgttgacaatgagggaggtgtgagagcaaggaggatatgggaaatttctgtaccttccacttacttttgctgtgaatctaaaattgctctaaaaatataataaagtcttaaaagacaaaacaaaaaagtaggtttagagagagatgatttggggtaaaaatgaaaattatggctttttgtttcagacaatgagaactgaaaagagaagtgatcttttaaagtatgagtttattctccaggttttcttaaatacccacaaattagtgtttttattgctgctatatccaagagctgaaaacaatttaaaatatgtacttttatcacatttaacacttacaagagagaaaatggaactgtttgaattttaaagatgtttttcagattcagtaacatatggaaattgaggataatcatagaaacagctattgaactctaaaataaaaaaattatatggaaataaaaggtatttcatttgaaaaatggctcatcacctctcctgctggttaatacactaatgacaatgaaatggaatcaagtgttatcttctccacatttaaaacaaagtgcttcttctcctgattgccagctttaggtctgaaatgtaaaacaggattaattgaggttccgaacaactcaaatatttcactattgtactttatgctaatgaattattttgtaatactaagaaaataaattggtaaatacctcatatatttgctggattaatgtttgacaggaaaaaacacgaaatggatgaacagctgatcgagtcgagtgcaatttggtcactgggacacagttacaaatagcactgaatcataatacacaaagagcctagtgtgtgttaaagaaagacgaaagaggagttgggtgcagtggctcatgcctgtaatcccagcactttgggcagccaaggcgggtggatcacctgaggtcaggagtttgagaccagcccggccaacatgatgaaaccatctctactaaaaacacaaaaattagctaggtgtggtggcaggcgcctataatcccagctacttgggaggttgaggcaggagaactgcttgaatatgggaggcaaaggttgcagtgagccgagatcgtgacactgcaatccagcctgggcaacaagagtgaaactccgtctcaaaaaatatgaaaaaaataaagaggaggaacacttgcaatctctatagcaacctatttggccaaatagtccaggtttgacaagcccacaggtaatgagtctctagaaagatgaagttattgagaagctagtttcaaattagctccaattttatttacatgttaacaatacacaattttatcttctatccttttcattcaaaggaaaattaaaaccatactctgttagtgtgaacttctgtttctgaactttccagttttgtttttttttttttgagacggagtctcactctgtcacccaggctggagtgcaatggtgtgatcttggctcactgcaacctccgcctcctggcttcaaggaattctcccacctcagcctcccaagtaactgggactacaggcacacgccaccacgcccggcaaatttttgtattttttttagtagagacagggttttgccatgttggccaggctagtctcgaaatcctgaccttagatgatccacccgccttggcctcccaaagtgctgggatccactgcacccggccttttttggttagttttaaaaagataagtgatagcagatgttgatgttattagtgtgaccaatgcattgaatttccaaagaataaaatcagattacttcagtactgtatgtcattattcacaatgactcacaggataaatatgacagatatcccacaactgtcttcagtcctgggatcataaaataggacaattgataatcttccattaagtggaaaattaattaggagaaatgccatttctagaatgctgtttttctttttctcttcatttgaatttttttaaagtagacctcacactttctttatttaagtatcattttaaataaccttctaacattgttttttctattttctctgaaataaatcaaattaaacttgcaaaattcgttcacaccaattcatctcaggtgtttctttgacagcaagctacttttaattccgtgaaaatattttaatactacaccacttactatgagggtggcctgacgtctttttgccatttttttaaagcattaaaaaaaattaggttatccagtgttcatataatggaactaaaagttcctacagagataatgaatttggaacaataatgatgtaatcagacttacaagttaaagccacaaataagccttataaaaacaactttatgttaaatttaaacccatataaagaaaggggagaggaagaagagcaaaaaaaaaaaaaaaaaaaaagtagtcactatccctatagagcggacttaacacccaataaactgtgtcaattatgtcagctgattctgttgaacaactgatcaagtgagaggatgagggctgaaagcaatcaagctactgtgattggaaccagccggactcaaaaaaaaaaaaaaaaaagtctacagtttaccagcatacacactcagtctagactttccgccacaatatcaaagtacaaattcttcacaaatcacaactctatcccaaatgttcttgtatgctctatgttgcttttctattctactaaatgactgatagctttacaatgagatttgttttatttaaaaaacacttgccaaatcactaccccacaaaatgttgagaatcagaggtaactgtagaaaggaaatatgtatatactgcttttattattggaatatgtttgttagttgaatgaaaacaaacagtagctaaaaaggtttcaaatgatagaaaaacatatctgggtaagttatgacacaactttttgtgtattcagacgacagaaatctgtatttttgcaccaattgcaaatgcaaagttaacaatgaacttggggaactgaaaggtcaaagggagtctcaaacatattcactattttaaaatttaagacaaagaagcttagaaaaaaaaccccaacatatacaccattataacagtctttttttaatgacttccaattttaacttttttctaaagcactaagacccttattgtagattatgtatcatctcctctttggctatgagatgcgtagttttgttaaccagagacattaatgagttcagtttctgagaccagtcatttaataaattatttggatccttgggtctctggaagttgataattcctgctaatctgtctactttagcaaagatggtcttgttaactactagatttgagagaaaggcttcggactcctgcaagagagaaagataaattggattaagacaggataaattacagacaataaacaaaacttcagaaaagcattttctgaactcttcatccaagaatatgcaggggaattcattcttaagagttagtaacactcagctgggtgtggtggctcacacctgtaatcccagcactttgggaggctgaattgggtgaatcacttgaggtcaggagttcaagaccagcctgagcaacatggtgaaaccccatctctactaaaaataccaaaattagccaggcatggtggcacacgcctgtagtcccagctactcaggaggctgaggcaggagaatcgcctgaaccctgggaggtagaggttgaagtgagctgagatcgcaccaatgcactcccacctgggcgacaaggtgagactctgcctcaaaaaaaaaaaaaaaaaaaaaaaaagagttagcaactgctgacttcctataataagtacttattttactgatagtctagggaatgaatagaatctgagtagactcagtcaggggtgagtttgaatctgcctccttgcaagctcaatactgctggtatccatgccaacggcaagttggtctactcccttttctacaaagtttccccttaaaaggcagtatggtacagttaatttgtttccagaaatgctgggttagaatatatgctctgctacttggcaagtatgtaccacggacaagacacttgacttctaaggactctggtactctcattcataagtgacaagagctgacaagctgatcaaggaacaaaccttccaactctaatgttccatgagtcttaccacctaaactgtcacagatccttctggggacagaaatggctttcaggccattactacacacttgggttaactcctctttgtgtgctatgcattttgtcaacatagaaacatggacctaaagacaacactgttccaacaagacctaggatcacttgatacttaagttagtttttggtactcaagattgcttgggaaactattactctattacctaaacataaaattaaatcataacattgattttcttactcaatttttacaagtcaacattcaaaaggaatgcctacaaataactcaaagttgattactacttacatcaacagatagatccagaagctgtgccatccttttcattgttatccgagtataatacttggccattattctaatattctggggagaggatagagagcagggagaacacgtaacatttgtcagtaagtctaaaagtccatttattttcatatccaagtaagtttacttaaaatgttagactcagagcttttatttttctacagtccatcactggagcaaagctagttctaagtttcaataacaaaactaaatacttagatattttggtttctgtagttattctgaattactatgaatattctacacagctctttaaatatatagtcaaaatatatgcctgtcttaactagtggttaaaaattataattgtactgaaatatttttgctgagtgcaagaatctaaagttaagattttctaattataacacaaatgttttaaaggctaaaatctaaaaaatgattggagatcgatcgggtgcagggactcacacctgtaatcccagcactttgggaggctgaggcaagaagactgtttgaggccaggagaccaagaccagcctgggaacacagcaagaccccatccccacaaaaaatttaaaaattagctgaatatggtggtgcatgcctatagtcctagctacctaggaagctgaggggggagaattctttgaacccgagaattcaaggttacagtgtgctatgactgtgccactgtactccagtctggatgacagagctacactgactctctttcaaaaaaaaaaaaaaaaagattagacatcatttcaaatactcatcactttaccattattccaatgacttaaagatagcttcaaattaaatttcctaatttcaactggcgatggtgctgaagttaagacacagagactcccctttactgttcttattggtagtattattaacaatagcactcaaaaaaaggtgggggaacagtggggagaaaaatgaactcaatctttgaagaagctacatcttctcccatctctatcagggctgatggcaacaccaacacatcagaaagcacgagaagcattcttctctgtgcttttatcctttaaatctaaccttttccttcatgctttaagtctaatcaatggctgcattctattgatttccttccttaaaacaatcccattccaagcagtctttaatccgttggctactgccttatttaaaatccatgtatctctcaccttactagtcttctctagtctcctatctctccaaatgcattctccacactcactctcagagggacttggtgcgcaggctgccctcccttgttcctgtctgcccgataacctcacactcctcttacaaacctcacctcaatcatcgattcatccgacctgatcatttctccatgtagaactaccaaagtttcccataagcctccctctgctctctagatacttgtactacaatatctgatactctttttatttataagtacgtctttccctataatttttaatcttattaaaggtagagtaatgggtaatgtctgttttttttgagacggcgtcttgctctgtcacccaggctggagtgcattggtgtgatctccgttcactgaaacctctgcctcctgggttcaagcagttctcctgcctcagcttcctgagtagctgggattacaggtgtgcgccaccacgcccggctaatttttgtatttttagtggagatggggtttcaccatgttggccaggcttgtctcgaactcctgacctcaggtgatctgcccacctcagcctcccaaagtgctgggatcacaggtgtgagccaccacgcccggcctagggagggtactgtcttattctcctgtgtgccctggtgctttgtaaagtgtctggcacacagaaggctcacaataaagtttgttacatgaaggagtgaatggcaacataatacaacataacggcagtgatactaaaaagatcaaagttcaggtttaagacatgttacctgcttccaagactagtgaatattaagagagaaacaccctcctgcccccattcttcggaaattctgtctggtttatatactataaattttggattcttaagaggttctctcacaatgaagcaagctaaaatatagctatcttttctgaaaagccaaaaatagggaaaaaacccaagatgagtgagatacattccaatatgctttgggaaatgcagagtaaacatctgaacaccaaatgtgcatcactactacagtgggcatagaaaaaaaatatcctaagtgaagaattaaacacataacatcctaaatgaacatttggttatcaaatgtgacaaatgaaatagtttatgctcaaaattgccaaaatttaattctaaaaagtaaattcactaaaggttaaaataaaaattgtcatctctatgacagattcttacatgttcaacaactctgttcttcaagtctttccaccttttttcaccttcctctgtagaaccaaaaacatccgttgcaggactctcaagggaaccttttcttaattccattccatagtcctcaacaagtgtggaccaacgcatcaactccattgtggtaaaaagctttaaaagatccctgaaaattgtatacatcttaatattccaaatctgtaaaaattaagtattaactaatataatagcaaagttcaaaaaattcagcaaagactgttttcgttaaattttatttagtagaatgagacaccatatgattattgtgtattttaccaactttattaccatttttcccacagtagttcagaatacagcattctcccacttaacactctgctctcttctgcactgtcaatttctgaaataactgaatgtaaatgtactcatgaaacaaacagaaataagagcctgttgtgtttatgatgaagcaagtctattttatataatagattttcacaagtatgtatttctgaaaatcacaaagctctaaactactaatgatgaaactctatcaaataattaatcaaaagctgcaaatgtagacctgatatgaaacttccacttgataagcaatttagaagaaagtatgttataatctcatttactgctgatgcaatgctaaaaaaaaattccaccacgttatcctctctagttttattctctagtatacgctatcagtaaccaattaagaagtacacacttaggccaggcgcagtggctcaagcctgtaatcccagcactttgggtggccgaggtgggcggatcacctggggtcaggaattcgagaccagcctggccaacatggtgaaaccctgtctctactaaaaatacaaaaattagctcggcatggtagcgggtgcctgtaatcccggctactcggaaggttgaggcagaagaatcacttgaacccaggaggcagaagttgcagtgagctgagattacaccattacactccagtgtgggcaacaatagtaaaactccatctcaaaaaaagaagtatacacagaagtatacacttaggttagccaattttctttcaaaatggtgtttcgactgagatatatcatgctaatttcaaaagtacttacttgtatttgggaatttcttctaacttcttgtcaccacttattcggtgaaccaaatctgactgttcattgtcaaaaggagccaggataacatagagtacaacactcttcagagcctaaaagagttgtacaacaagttatatgcaagactggacataatggaaactttgacaaaaactgaacaatcatggaataactatatatccatttcaaattttaaagtcttggccgggcgcagtggctcacgtctgtaatcccagcactttgggaggccaaggtgggcagatctcctgaggtcagatcgaggctatcctggctaacacagtgaaaccccatctctactaaaaatacaaaaataaaaaaaaattaggccgggcacggtggttcacgcctataatcccagcacttcgggaggcccaggcgggcggatcacctgaggtcaggagatcgagaccatcctggctaatacggtgaaaccctgtctctactaaaaaatacaaaaaattggccgggcgtgggggcgggtgcctgtagtcccagatactcgggaggctgaggcaggagaatggtgtgaacctgggaggaggagcttgcagtgagccgagattgcgccactgcactccagcctgggcaagagtgagactctgtctcaaaaaaaaaaagaaaaaaaaaaattagctgggcatggtggcacatgcctgtagtcccggctactcaggagactgaggcaggcgagtcacttgaatccgggaggcggaggttgcagtgagccaagactgtgccactgcactccagcctgggcgacagagcgagactctgtctcaaaaacaaacaaaaaacaaataaacaaacaaaaaaaagtcttaaggggaaaaatattgcaaggctgccttttcatagtgtctttctatagtatttagttttcacaaaactattataataaatcattgctaatctgacttactcccctcagctgacatttttcttgacattcatttttgacaaatgtataaagaaaaagttcttataacaagttagcagtataaatgtggaatatatatataaataagccccttaaaacagcttttgtaaaataattttccaaagtaatgccgggtctttaactgcaacctttattaggatatgacccactgtacacattttaaacaggaatcctacatttctccaaaagtgagacataatctaaactatggctgcaattggactgaatcagtaatatactgaacaacactgaatagaaagcagcaccatacaattgcatctaactattgcagttaaaaagatttgaaaataaaaaaagcaaattactcttctgaataagaagccatgtcaattacacgaatatattcttacctgctgccatttttcactttctgcctgtatacagggagtatcatatattgctctgtagtgcttacaaatagacaaataggatccctcatgttgatccagctgaatcattaaattatagtacttcaactttaatttctgcaaaaaagttgacaaaacaaattggggtttatgggttttattcatacttttaaagtaaacatgtggtcacagatatgctcacctctgtattttcttcctggaaaaatttggtgttaattttcttgctgatgatttgtgttcgaatgtaatccttcacagctaggcagagcctcatttgctccaaaataaattccactcgctctttcttttccattgacccgtaggtttccacctagcacagtaattccccaaataagtttataatactttgcaattttgtgaattgcaataaaatgaaatagatattaaaatattcatccttgttaaataataagaaccttcatgtatatagggagagtgttgacaattacattaaaagctagttaccgctagaaaattacaatttataatggattttcccccttttggtataaaattctatgaattttaactcatgtagtgatttgcataaccatcatcacaatgaagacacagaaccccaaaaatcttcctcatactgtccctttataatcacacacttcccccactcataagccctcctaagacatccagtgatctgtacttcatcactacaaatttgtcttttcaagaatgtcaaatatagtatgtaactctttgaggctgtctttattcactctgtataatggcctaaattgtaagattcactcaagttatacatcaatagttcatttacttttattgcttagtagtattccatcgtacagacataccacagtttattcacctgttgaaggatatctgagctgattttatctttttactatcacaaataaagctattctgaacaggttttgtagactgggtttacgtaaacataagttttcatttcccgtgggtaaatactcaagagtgggattgctgggtcatatggtaagcatatgtgtaactttataagaaactgccaaactgttttccagactggctgcaccaccttgcattctcaccagtaaggtacaggagttccaggtgctttgcatccccaccagcaatgagtattttattgtttaaactgtaggcattttaataggtatgtagtggtaccccattgtggttttaatttgcatcttcttaatggctaatgaggaaatgacaattttcagtatgaaaaaagatgccattcacaggctttcaatcaaaatccaaaataattattggtcccaaacattttggataagggatactcaacctatatttccattagaaaatgctgctgacaaaacaaagttttaccaactctaaaatgcaataccttacctgtaactcctgtaaaatggaggctgcctctttcacatcaccattttgttcttttatagttgctaatgttttagtcagtcgcgcacgctcaatttcaacataaatctacaaatgagaaatttacacaatcaaaattccatggaaacgtgttaaaatttaaaaagtaggctgggtatgttggctcacacctgtaatcctgacattttggaaggctgaggcaggaggatcgcttgagtccaggagtttgagaccagcctgggaaacatgttgagcccgtctctactaaaaatcaaaacattagctgagtgtggtggcatgcacctttagtcccagctacttgggagggtgccacaggaggatcacttgagccccagagttcaaggctacagtgagccatgatcaggccactgcactctagcctcaacaacagagtgagactgtctcaaaaaaataaaaggtagaactgaactacttttttttgttttttgagatggagtttcgctcttgttgcccaggccagagtgcagtggcgtgatctcggctcaccacaacctctacctcccgggttcaactgattttcccgcctcagcctccagagtagctgggattacaggcatgcgccaccacgcccagctaattttgtatttttagtagagagggtgtttctccatgttggtcaagctggtcttgaactccagaccttagatgatccgcccacctcggcctcccaaggtgctgggattacaggcgtgagccactgtgcctggccagaaccgaactattctttaacccagctataagaatattttacagctcttgtgcactttatccgccatgtacaaatacagctgtgagacattttatatttcacaaatatagccataattcttaagaaaatgtctctataaaaccttatccatattttgtaactctgctttgagaacctaaatatgaaattactatgtttaacaaataataggaccacaagctacataaacggcacagaagatgcaaaatgccttgtgattatttgaaaagtgtgttatatgtagtccaatgtcttcaattaatactctaattctgacttatctttaaatacaagactaccttctttaaaaatatctaattttgctaggtattaaagttgttaacatttttgtagctataagtaatgttagtagatttataatttccaacaaattaaacaccaaaaatatgactacagtataacctaaagcacctagtgaatgaattttcatgcttaggcttgcttaccctattttcaataatatcaaaccaattacagcttcctacatctattatacatttcttactttgttatctttgaatattatttcctctatgtctaaaatgctcttctcccacaccctgaccctgtagaatttttattcattttttttaaagtcacatttaaatccgtgataagatacccaattcccagaaaaatctagatataccatggctgtcagtatttaaatagattcatttgcagaaagggatgtacaaagacattattggttgaattacagtgatgacattttgtgtatttctttaaaaaataaacataaaaatatacaaaatatctacatacattaagtatctctgaatacagaaaaaacagttcatatcattttgagttatgtcaacagaaaatttaccttgccttcggtaaccattcgtagagtatcaattaatcgaagtttgataggaaggtctgtgatttcctcaacataagtacagcactgttgaaccattttggcaacagcctaaaatattaaaaaccattcataagtaaaatacattcctcacagagcgaaaaaatgtattttattgatcaaagagcaatgatcgaacttggtcttcccaagtaactctagacaccaaaatgtcataaagaacatcacatcgaaatctcactgatacctaaaaagtaccgagtaccccgtaacaagtcagtaaaggtcaggaaaacctcagatgcagagatgcagccaagcaggaaaacatggaagaaatggcatctgactaggggaagagaaagcagaggtccacagcggcttgaagccatgacctgcagacactgtgactgaggaggaaaaaggcagtggcagaggcaaaaggcgaaacggttctaccacccgggtgggaggaagagccacagtcacccaaattcacctcaataccatgtgacactgagagccagagaccctcatgccttcagtttcctcacaggttatatcaaggggctagaatacactcccttcagcactaacattctatgatccaggtcacaaatcagcaaacattttctgtaaatttttgcaaatgttcataaagtagttattttagactttgtgggccagtctctgtggcaactattcaactctgcctccttaaaaacaaatgagtgtggctgtgtcccaatgactttatttataaaaataggaggcgggtgggatttgatttgtgtcccatcatttgccaatgtttgatctagattttaagcaatatatgataatcactaacaatcaggaccatgggtcaggcgtggtggctcacacctgtaatcccagcactctgggaggcagagatgggcgggtcacaaggtcaggagatcgagaccaacctggctaacatggtgaaaccccgtctctactaaaaatacaaaaaaattaaccaggcgtggtggcggatgcctgtagttccagctacttggaaggctgaggcaggagaatggtgtgaacccgggaggcggagcttgcagtaagccaagatcgcgccactgcacttcagcctgggagacagatcgagacttgtctcaaaataataataataataataataataataataataataattaggaccatgagtcatcaagaaaatgttaaattacattaagtatattttggttaaggcagcagaaaagtgaatagaatatcttagaaagatttccacgaaaaacatttaatgtttaagcagctcaggctaaatgtttttgttgtggaggtggttttattttattttagattcagggggtacatgtggaggtttgtttcatgaatatattgtatagtggtgaggtatgggcctctagcgaacctatcacccaaacagtgaacattgcacccaataggtaattttggatacacaggtaaccctcacctcctttcatcctccctgcttttggagtcctcagcgtctgttatttccacctttttttttttttaattaaaaacatttttttggctgggtacggtggctcatgcccgtaatcccagactttgggaggctgaggccggcggatcacgaggtcaagagatcgagaccattctggccaacatggcaaaacccagtctctactaaaaatacaaaaattagccgggtgtggtggtgcatgcctgtagtcccagctactcaggagtctaagacaggagaattgcttgaacccagtgagccaagatcgcaccactgcactccagcctggcgacaagagcgagaatctctctcaaaaaaaaaaaaaaaaaaattttttttaaagagatggggcctcattttgtcacccaggctggagtgcactggcatgaccacagctcactgctacctcaaattcctgggctcatgtgatcttcccacctcagcctcttgggcagctgggactacaggtatgtgccaccacactcagctaatatttttaaagtttttttgtaaagacaggggtctcaccatcttcatgcccatgtgcacctactgtttaacttccatttatcaatgagaacaagcagtattaaacttttaactatctgaaacactggctatttagagacccaggcattctggaaagctatggttttattgtaaactataactctttcaataagttcaaggccctaggacatgtagtgtctcacaaaacataggatgcctgtaaagttaattataataataatttctagaagagcacacaacttgataattctaaaagctgtgcaaaaaatacattaacagaaatcagatggggttaaaaacaacaactacagtagtctccacttacgaaggttttgctttccagtttcagttagccatggtcaactgtggtgtgaaaatattaaatggaaaactccatgtataaacaatctataagctttaagctgcacaccattctgagtagtgatgaaatcaaatgcagtccctcaaatcacccttcggtccagtgtctccacactacccaccctagtcactcagtagccatctcagtctcatgtgatccactgtatccagggcagtgcttgtgctcaagcaacccttattatacttcacaatggcttcaaaacccaagagtggtgatgctggccatttgtatatgccaaagcgaagccataaagtgcctcctttaaatgaaaaggtgaaagttctcaacaaggaaaaagcatagtggatatatggttttgtactatctgtggtttctggtctccagagaggatttttggacatattccttatggacaaagggggactactgtacattaatacgctaacaatgcaatggggaagctattaaaaaaattctaataataagtgaacgtcttgctcctctctgaaaaaaatgcaagacattcaggaagttacagttggagtgaccccttgggctcgagtgacagacaatgaatataaaccattcatattaagcaatttagaaaaggttatttccttccttcctttccttcccttcctccttccccccgctccctctctctttcttttgagacagtctcactctgtcgcccaggctagagtgcgatcttggctcactgcagcttccgcctcctggggttcaagcgattctcctgcctcagacttctgagtagctgggactatgtgcgccaccatgcctggctaattgtttttgtatttttagcagggacagggtttcgccatgttgcccaggttggtcttaaactcctgagctcaggaaatccgcctgcctcgacctcccaaagtgctaggattacaggtgtgagccaccatgcccagccaaaaagtttattttcttaaagctactttctaagtctgcttaagcaaaaaataaatttcgtaggtaaaaaataattatgagaaaagaggactctgtgggccacagagacatttatgtttcctaagaactttccatagctatgaagacataatatgttacagggaaaggagcatgcctggctccacttctggctgtcactagccagcggtgagagagactcaaattcctctctctccaagaagccttccccaataaatctaactcaacatattttcttccttctttcacatttctttgtacatctattactcttgtgtcacttatacattgcctaatgtatgtgtagcaattaaaaaaaatcttaagactacttgttaaagatgtgctatgattacttgtgacttacatacgttactaaccaatagggtgccaagggcaagaactataggctgcatgtctcttcacattccaagcactttacataaaaatacgtttctccatttggaaattaacagggccaggggccaggcacggtggctcatgcctgtaatcccagaactttggcagacaaggcaaaggcaggaggactgcttaagctcacgaattagaggcctggtcaacatagcaggactccgtctctacaaaaagtacaaaaattaactgggtgtgatggcttgtgcctgtagcaccagctactcgggaggctgatggggaggactgcttgagcctatgagattgaggctgcagtgagctatgattgcaccactgcactctagcctgggcgacagagactgtttcaaaaaaaaaaaaagggaagaaaaaagtaagcgttaagcaacaccccctactagctctgagtttttatggcatgagaaattaaagtttaagatgtgtgctttgaattgtcctaatactacataaaacataaatttttgttgatttcaacctaggttgccccaagacttctaattaaggagccctttcaaaattgtcccatagagagtaagtttcttagaaaatagagtaagacgatggtttgtctaataattgtctctcaaaccactgaactgggcaccaaaaggcacatttaagtaaatttcatggctgggtgtggtggctcatgcctgtaatcccagcactttgagaagctgaggtgggtggatcacttgaggtcaggagttcgagaccaacctgggcaacatggtgaaaccctgactctactgaaaatacaaaaattagctgggtgtggtggcacatgcctgtaatctcagctacttgggaggctcaggcagaagaagtgcataaacccgaggggcggaggttgcagtgagcagagatggtgccactgcactccagcctgggggacagagcaagactgtctcaaataaataaatacatacataaatttcacattcacatattttaggttgtctcaattaaattaaatctatactaattcttcacatcggcttgcatatttttggtttttttttttttttttttggagacaagagtctcatcctgttgcccaggctgcaaagcaatggcacaatctcggctcactgcaacctctgcctccccagtcaactgattctcctgccacagcctcccaagtagctgggattacaggcgcctgccactacactcagctaatttttgtattttttgtatagacagggtttcacagtattgcccagactggtctcgaactcctgggctcaagcaatccacccaccttggcctcccaaagtgctggtattacaggtgtgatccactgcactgagccaacactgtcttttatatgcatgtaaacttacctaaagaaaaataaaccaaaatcaattacagtaactgacttctgcaaaaaataatttaacccactttaatactatccttaccctagaagcagtctaattaataaaatcaggaatttgtccagtaacactatatatctatttttggttccattacatcctcttttacaatgccattgtctttattatttaaagcaagaaattaaaacccagaaactactcaggaaacagtatttaaaagatgagataaaaatgtaaaaaatgagatctacttgtacaggggaacatttaaatatatctcaagaagaataaggaaacagtaaagaaaaatccaacttcaccaaaacactaaaagagaacttacataatctctaaacaaaatgagcaaaatagtctctctaaaaatggcctcaaaaataagttggaagccgggtgcagtggctcatgcctgtaatcccagcactttgggaggctgaggtgggaggatcacttaagcccaggagttcaagaccagcctgggtaatgtagtgagacccaagcccccatttctacacacacacacacacacacacacacacacacacacacacgcacacacacacaagattaaatgtttaacagtacattcttttggcagacttcagttttctcaggcaggcactctaagtgggggttgggtcatcctggaaatgcagccttgagctgttagaaacaatcttagtatttgtttaagtctacacaggacaaggttaaggacttgtcaagaagagggctcagagagtttagtcaaggagagaaatctttatcaacatgcatagtttttgaatgtcagtaatacctcaaaaagctgttttgcaaaaaaatcatatattgggataatataagaaaatgaactttgggaggccgaggcgggcggatcacgaggtcaggagatcgagaccatcctggctaacacggtgaaaccccgtctctactaaaaatacaaaaaattagccgggcgtggtagcgggcgcctgtagtcccagctactcgggaggctgaggcaggagaatggcgtgaacccgggaggcggagcttgcagtgagccgagatcgcgccactgcactccagcctgggcgacagagcgagactccgtctcaaaaaaaaaaaaaaaaaaaaaaaaaaaaagaaaatgaaatatttagttactactaaaaaaaaattttgaaacagcataaaaagatgtgcttaataaaagggatatgactaaataaaatgagaatatcagcttgataaattaaaacaaaaccatttaaaataataaaagtggggctaggcacagggactcatgcctgtaattctagcattttgagaggccaaggcagagggatcacttgagcccaggagtttgagaccagcctgggtaatatagtgagacctcatctctacaaaaaataaaaaaattggccaggtgtggcggcatgcgcttacagtcccagctgcttgggggctgaggtgggaagactgcttgagcccaggaggttgaggctgcagtcagttgtaatcataccactgcactccagcctgggtgacagagtgagaccctgtctcaaaataagtaaataaataaggaaaaaataaaagtagcaataccaaaatagaacaaagctgtatgaacactctaagtacaacacaatttttaaaaatatgcaaacatataaagactagaagaaaaaacagaaaacagtcatatcattgtgagaatgtagactgaattttaaaacaccctctaggatgttacaacgttgacttaacacattttaaacagacttatagaagagcttgtgaaaagttctgaaatacaaatgcttttgtgtttggagcagacatgatcatgaactcacttgttttaactgactccgccttttggacaaaagcataatattttcattaagtaaatcccattctttagcctcatagcacatcttcactactgcaactaagatacgggatgtcgataccatatcggaagcctgtaagggtaaaaatatattgaaagttaatggaagaatgttcaatgaaattaatggtaactgagctttcccctgtaaactactcacagtacgagtctgcttttccagagagagaagggtttcaatgacttcttgaagtcttccttcctaaaacaaaagatgaaaatgaacaataaaaaaacacacaaaatgcaaataactagtctaaaatgaaatggttttgacacagaaaaggaaaaatcaacagcctcttctagaggaaaaggactacccataactagttttgtttctctccttttcatgatagtgcttccttctctagtgggttccatcagtcagtggttccctacttgaagcccataagctatttttaatatttttaaatgcctaagagaaactgaacatataacaatcatgtaacacctaagaaaacatcaagtctttgttttggattctaatttatcaactcagtgtggtaacacctgtttatcttgttctttttttttttgagacagagtctcactctttcacccaggctgaagtgcagtggcaccatctcggctcactgcaacctccacctcccgggttctagcgattctcatgcctcagcctccggagcaggtgggactacaggagtgccccaccacacccggctaatttttgttgttttttgtagagatgggctttcaccatgttggccaggctggtcttgaactcctgacctcaagcgatcatcccacctcggcctcccaaagtgctgggattacaggcctgagccactgcatctggtggatcctgttctgatcagagactctaagtggtagtcacatgtgtctttaaagaataaaaacagaggccaggtgcagtggctcatgcctgtaatgacagcattttaggagaccgaagggggcagatatcttgaactcaggagttcgagaccaggctgggctacatggcgaaacctgtctctacaaaaaaatacaaaaattagctgggcattgtggtgcatacctgtagtcccagctactctggaggctgaagtgggaggctggcttgagccatggaggtgaaggctgcagtaagccaagatcgcaccactgcactctagcatgggcgacagagtgagaacctgtctcaaaaaaaaaaaaaaaaaaagaaaagaaaaaaaagaaaaaaaaagtaggaaaataaatgattcctttatgaagttaccgtcaccctaacagatattttaaaatacagagttccaaggagaaataaaaagaatgcttggagctaaaagacaggaaactatggtttaatttttcaatgactttaagaataaattagtaatcatgcttaccggaaatgaaggcatctgagaacacccacacatgctatccttaaagtcatgctcttgagcagatactgattcaactgaaatacagtttctgacaacttacactaacctctccacatctctaactcagatgtaaaaataaaacattctccctaggctatatatttagagattggaacaataaaactcaaataatataaacataaatgataatacaccaggagtaaaacaagttatcctattaggaaccacacattttgataaaaccaaaaccaacatacagcacaaaaactgcactcattggccaggcatggtgtctcacgcactgtaatcccagcactttgggaggctgaggtgggaggacacttgagcccaggaattcgagaccagcatggaaaataggggcagatcctgtctctacaaaaaatttacaaattagctgggcaaggtagcctgtgcctgtggtcctagctacccaggaggctgaggcggaagaatcacttgagtgcaagagtttgaggctgcagtgagctaggaatgtaccactgcactccagcctgggtgacagagtgagacctggtctctagataaaaaatttttaaaatgcatttatttaacatgctaatattaataactatcatgtaaatatctctgacaataaattgaaatgagaagagtattgtttaaaaattgtttttctaaccaaaaatgaattttttttatcttaataacattcatggatgatacgtgagtactatccttttctactgatgaaagaaacttattaaatagcttctgaattatgggcataaataatgttttgactttttaaaatactgctgccatatttttccaagatagcttttaaacatgcatgaatcttccatgcggcacagcatatatactgcatggcccgtctgaacttattttaattaaatctgaaatatgtgattcttaacatattttaacaacgtttcctgtttggagagccctagttctcctttctctgaaagttctatagatttatatatataataaatactggctaaatgttcatcagaggaaaaaaacaatgaacaaatctataaattctccaaagttgaaggctaataaatcctaaaagatgaaagaatcttagaactagaaagacggctaggcattatttaattcaatcatttcattttagagattaaaaagactgaggactaaacagcttaaaatgacttgcttagccacaaaaggaaatgagcagcactagatccggggctcctgcctcaagctccaaagctctctccactagagtgcagcgcttcccctactgtactagtttaaatctcacctttcgctttgatcaaagtcatctctatggttactatctggcaacaaaatgaagggcaaaaatagttaaaatgcaaaatactatttaatgacagtcacccatcacatttgcaattactattagtcacgtgactgtgatcaataaagtgtggtttaatatatggtattctaattcagaagcatgggtattaaattgcatcatacatgtgagagaatcacacattggcctaaagccacagtctggagtatcaacaaaacattaaacgtcattttcttacaaaggcatttttggataacactctctaaaaatcagtagtcacttagtacctcttcctttcatactcaaccatactgactctactctgcaattaccccaaactatattctattttggtgtttactgtctttccaatctcagtagaatgcgaactctgtaagagcagggatgccatgtctatactgttcatcactgcagttcagtgagctgcatcacaccaagcacatgccactgcttctgcagacactatggtccatccttccatccttgtatcagttactgatgcacatagcttacctcctaagtggtctacaagttcctttagggctggatcctcgtttacttgtcacttctctttgcaccaacctccatataatacgtgttgaatggattggcactcacctgatctgtattcagttgatctcaatggcttacgattcctgattcttactgtcacaataagcaggatgtgacaaactataccgttgacaatttagtgctatttgaaggacactaccatcatttcatttaatacaatttccaattttcaaatcatcccccttttttctcccaatcttccacattctaccctatggctaaacatcctcctctttttcctgtctattcactcaggtcctgaaattccaactccttgatgctgcctttcaactcagaggaacaaatggttagaaagctatccaaaaccaacctgttagaacatgtgacttcagtgactcattttcctcattaaaataatccttgtaaatgatgtaagcgactaatgagtttgttcaacatcaatgttgagtataagttctgtttgcacctcctttaattcctgaatgaatccaatctttcaatgatttgttacacaacctaaataagaaagaaaaaggctaataaaaagtcaccacagccaggcatggtggctcacgcctgtaatcccaacactttgggaggccaagacgggcagatcacttgaggtcaggagttcaagaccagcctggtcaacgtggtgaaaccccatctctactaaaaatacaaaatttagccgggcgtggtggtaagcacctgtaatcccaactacttgggaggctgaggcacaagaatcacttgaacccgggaacgggaggttgcagtgagctgagatcatgcctctgcactccagcctgggtgaaagagcgaaactcggtctaaaaaaaaagtcaccacaaatagttgaaatttaaagccagtccaatactccccctacatagtccaacttttaaagtgacctattccttaaaggggtctcttttgtttaagctgttaacaatgtaaactgttttacatttcacttgctctttttgacattaaccataagaggctgaaggtgaccaaaagaaatgaaaagacattaagccaggtacagtgttgtgcactaccagctactcagaaagctgaagcaggaagatctcttaagctcaagagtttgagatccctgtatctaaaaaaaaaaaaaaaaaaaaaaaaaaaaaaaaaaaaggaaggaaggaagggagggagggagggagagagagaggaagacattaacatttaggcctagtgttccattactggaacgctaagcttgtgggagttatttatatcctactgctcaaggtcatcgccaagatctgatttttcacaaaaaagattttgcaacctgcagcacaaatgggttaagaggaaggagaatcaaaggatacattcaatttaagaatgtaagtagtccccaaataaccatgtgccaaatacaacataatcaaaaagagagaatgagaaaccctcagtatattaagaactgctaaataccatatctttacagtgcagaaaaggccctccttaatttttaactcctgaatacaaggcaaagagataaccatcatcaagaactagtatcacttttactaacaccccatcatcccgacacagggtgcttacacaccaatcacagaggcggtagaatggttaatttatacaggctctggctgggcgcggtggctcacgcctgtaatcccagcattctgggaggctgaggcgggtggatcacaacatcaagagtttgagaccagcctagctagtatggtgaaaccctgtctgtactaaaaatacaggcatggtagtgcacgcctgtagtcccagctactggggacgccgaggcaggagaattccttgaacccgggagatggaggttgcagtgagccgagatcgcgccactgcactccagcctgggcaacagagcaagagtccatctcaaaaaaaaaaaaacaaaaaaaacccaaaaaaaaaacaaaaaaacaaaaaaaacccactacaggctctgcagccagactgctcaggtctaaatcccagctgtactaccatattaccttgagtaaaacacaagctctctgactctcaattttctcttcagcgaagtgggcacaataattgtaccaatccacagggttggtgtaagatttaaatcaatacctataaaggcatgcctggaacacagtatgagtacatatcattatcatcatagcagctgacattttaataaaacgtatacagcaataaatattagttattatcatttgcaacatgggtgttaggacagacataaaactgtactaggtgacaactacaagtgatttaaaggatctacatttggcaattttacaaaccaactctaggatttgtctgcctttctaaggcttctgctaaatacagtttcccatctaatacattattaagtctctatatacaactttttttttttaagagataaggtctcactctgttgcccagggttcagtgcagtgatgcgatcatagctcactgcaacctcgaactactgcgctcaagcgatcctcctgcctcagcctccagagtagctgggacaacaggtgcgtaccacaacacctggctaattttaaaaatttttttgtagagacagcatctcgttaggctggcctcaaactcctggcctcaagtgatctttccacctgggcctcccaaagtgctatatacacaattttcatcttcaaatgtctttcacatttaaaataaaaaatgccttaaggaaattaaggacagaattgataatctcttaaagaggtagtagcaaaaagaacactattctttttaccaggagatgtgagtttgatctgccttgaataaaccacttaagctgcctgaagcttaaattttctcacaagtgaaaataacaagacgttcttcatagtttgatgggctcaaaataaaatcaaaagaatgtatactaactgttccatacattccaatgtagaaatgcaatgttaatttttttttatgtttggcagaatggttagaaaataatatgaaatggaaaataaaaagcagctgggcacggtggctcatgcctgtaatcccagcactttgggaggcagagacaggtggatcacctgaggccaggagtttgagaccatcctgaccaacatggtaaaaccccgtctctactaaaaatacaaaataagctggacgtagtggtgcatgccggtaatcccagatactcgggaggctgaggcacgagaatcgcttgaaaccgggaggtggaggttgcagtgagccaagaccgcgccactgcactccagcctgggcaacaagagcgaaactctgtctcgaaacaaaaaataaaaaaaataaataaaaagcaaaacagaaaaatatgtttaaaaaaattaaccaggagtgtagggtaaccatctaatttacagttgaaactggctcggtatcaaaaaacaaacaaaaaaagtataccctcccacaacatataccttgttttattcagctggcacactggcttaaaaaaaaaaatcaaaattcaaatgtatctatcttaacaggccccaacattcttttttttaaacacttctgttacccactggacacctaaaaaggcatatggtattggagtttgcaagtttttcaacagcctggagcataacaacaattatttaggaataaatgctacataagatcaccagaacaactgtagcagtgaagtcttttttcttactgatctataagctgttcgagggcaagagctttgtctagtaatctctgtatttctcatagtgtctaacactgactaggtcttgcaaacagtagactggtattaacagaaattcataaaaggaagatttggttgtccttctctagagcaaattacttgtttcttccttatggacactatcattctattaattccaaagtggaggttcaggggctgaccttggcctgtatgttttgttctagctacattgtattggctcaaatagtattttaatatgacagattagtatccaatttctaaatattaaggtatttaatgagaaattcatcttcctggtttctccctcaaattagcagcatcgacaatactcggccttcatccccaattggcaaagattatctgaaggtgaagatctgccgtctccttttcctgggcaggtgctcgaaagttcaggtttttggccagccgcggtggctcacgcctgtaatcccagcactttggcaggcagaggtgggtggatcactttaggtcaggaggtcgcgtgcgaccagcctggccaacgtagtgaaaccccgtctctactaaaagtacaaaaattagccgggcgtggtggcacctgtagtcctagctactcgggaggcggaggcaggagaatcgtttgaacccgggaggcgggggttgcagtcagccaagattgcgccactgcactccatcctgggtgaaaaaagtgaaactccgtctcaaaaaaaaaaaaaaaaaaagttcaggttttcactacaataggcttctaggcaggacagcatggtgtgtgagggcaccagctccagaatctagaatcggtctgcctgggtttgcttcttggcttcaccactttactagctgtatgatcttggggcatgtgattcaactttttctagcccaagttttcttacctgtaaaataaggataatagtaatagccatcgcatagggctgaggtgaggatcaaatggcttagtgcatgtaagcacggtgcctgacactgcagaaactactcaacaaatatcagttattgttatctgtctggcattggaggcggctgagttttcccacccttatgtaactgatgtttgttgatgctagctgctagaaagctcttaatgaatttgtggctccccctcagcaagcatactgaacctaagatatacatacgtaccaactttatcacctttctccatccttgtttcttggaaagcccgttaaactcttatagtgcctacttgtctttacttctgtagttccgtcttcagtaatgactccaccccacctcaatcttactaattcctcaagacccaatacaaacgtcagccttcctgtaaaaccttcccttatggcaccattaagaatgcatagcttccttctcggtgttccagtaacactttccccttgtatggccctcaccaccatgcatgacttgactaattcatcacgtacatcaactcctaaaggacagggtcctgtgttagtcatcttcgtactatcactttcctgccccttctcctggccaaagaccaggcacatagccatgatccacaaacgatgtaacgacataaattgattgagcaacagcaacagaacgaaactctctgatctagccttaatactgaagcggccttaacccctgggaaactactaaggtaaatatcacttaaacagcatccaagaaacggcaaaaagttaaacggagccctaagtcccacggagggaagtgaccatctgttttggggagggtctgggaagctataggcgctggcgtactccgcagccctggccgggccgacctggggtctcccactcgtgcaggcccaactagggctggacaggcattggggggtgcacgctccagcccgcaggccccctgaggcctaagcaggctccgcgccgtgactcagcccctggcgcccgccaacagccagccggcctctcctcaccttggctagcttcgcacactcgggtaggcgctgatccaccgtggcgctgtagtccacctccatcttgacgatgcgcccgtcagcccgctccgagccgccgtccgccatggtccccgcctgagcgtcccttgctgtccccctgcttcggccaccactcgtcacccacaccggaagttgcccgcgcacccgctcaggcagcccatcgggagcccacgcaaaggacccctcgaggtccccggcgctggttgccactcaggcactgccgcggacagcctgggggtggggcttgaggcgcgcggggcgggactcgccactccagcctgcagcgtcaggttttgtctctgggaacatcagactttttacctaaaatttgcgatgagaaaagcgagtgtaatagaacagaccatctcatatatccctacacccctgcttcgaaatatgatttctcaggaccgtggccagtcgcttttcttggatctcggttttctcatctctacatcaggaggctaaaataaaccttaaaatagaaaattctaaggttttatctacttgagaatcttggtggcttactctgtgggatctctgaaagctcctaagagaagatatggcagcagctcagtcatttaataagcaaagtggtttttctctttgttttcattttcactgtaatccactaagttggtaaaaagaaaagttaaaaagacatatttgttatccctataggattttcgtgagcatcaaactagatgacatgtgagacaatttcaattcttaagggccttacacgttttatgtgttatcattcataccatgctggtccctagaaaatagcttgagatcttaaaaaagcttaggatccttgaaaatgggaatgaggccgggcgcggtggctcacgcctgtaatcccagccctttgggaggctgaggcgggcggatcatgaggtcaggagatcgagaccatcgtggctaacacggtgaaaccccgtctctactaaaaatacaaaaaattagccgggcgtggtggcgggcacctgtagtcccaactactcgggaggctgaggcaggagaatggcgtgaacccaggaggcgaagcttgcagtgagccggcgagattgcgccactgcactccagcctgggcgacagagcaagactccgtctcaaaaaaaaaaaaaaaaaagaaaaagaaaagtaaagaaaatgggaatgaggttgtgtttggtgtgggcatatggtcaacagcagcctggaaagcaaacaggaaaacgggaaatcttggagtggtttatctattatgttagtggttctcaatttaattagtgccgacatcgctttatagatgctgaatagatctctttgtttgttttaactgcaatgaaaatcagggaaaatataaaccatctacaagcaaaataagacaatatctcagctataatctgtaatgtagaggagaaacaaattttaccttttttttatttttgtagagatagcagctatactacgtagcccaggctggtctcaaacacctggcctcaagcagtcctctcaccttggcctcctaaagtgctgagattacaggtgtgagccactgtgcccaaccaagaaacaaattttaaaatagcaaaataatatatatttcaagagataagggctaaaacatgtctacagtggaaaatacaaggaagtagttatttacacccatacacaataactataaatgtaaaagctgcaactgcaacaggtgtgttctcttggttcctgaagcatggtaagggcctattgttggtgacattttccaaaatggtgagcaacaagccacttcttggtaaagctcttattgttttttttttattttatagtccatcagatgggtcttatggctcatgcctataatcccagcacttcgggatgctgaggtgggtggatcacttgaggccagtagttcaagaccagcctgaccaacatggcgaaaccccgtctgtactaaaaatgcaaaaattagccagtcgtcatggcacgcacctgtaatcccagcttctcgggaggctgaggcaggagaattgcttgaacccgggaggtggaggttgcagtaagccaagattgcgccactgcactccaacctgggtgacagacgagaccctgtctcaaaataaataaataaataaacaaagaaactttataatccatgacacgctgaaataaagttctgactatatcaacatataatcttccattgtttttctcatggaagaattcttagaaattttagttgatgttaaaagtgaaagaaaagtagcttgtcgtaagtaaaattgacttagagtctaggcctcagacacagaagaaagtgtctggtaggacattcaaaagtctgatggaatgtgggacaatattttattgtgtgggcttgttgcctggcaggctgtttagcattgcaattacatgctggtgtctccctcttccctctgtgattgtcacaacccaaattcccctgcaggcttctaaaacacactctagaggctggtactgttgagacacactaggctaagatgccttttcactacatattctgtgtgacattggtttgatgagagtagacaacaggatctggaagtgtaaatttgttttttgttaaaaaaaatctttttggagacatagtcttgttctgttgcccaagctggagtgcagtggcaagatcagggctcactgcagccctgacggcctaagctcaggtgattcttctgcctcagcctcccaagtagctgagactactcagctattggtttttgtttgtttgtttgttttttgagacggagtcacgctctgccacccaggctggagtacagtggtgtgatctcggctcactgcaacatttgcctcctgggttcaagtgattcccctgcctcagcctcctaagtagctgggactacaggcgtgcaccaccacacctaatcaatttttgtatttttagtagagactgggtttcaccatgttggccaggctggtctcaaactcctgacctcaagtgatccgcctgccttggccttccaaagtgctgggattacaggtctgagccactgtgcccggccctcagctattgttttattatttatgtatttatttatttatttttggcagagatgggggaggtctcactgtgttgcccaggcgagtcttgaactcctggcctcaagcgagcctcctgcctcttcgaaagtgctgggattacaggcatgagccacagcgcccagctgaaggtctaaatttagagtgaagagtttgagaagacaaaaagtaacaaaggtgtgatggagtagacagatttatgatttcctgaactcaaaaataaagggaagggtctaagaaggggcaaataggagggggagaaaagtagttgactcccaaaccaaactgaagcccttccttgctgagcttagaggtaaaagaaaatgaaagcaagttgagatcctaagaaaacaagagattaaagttaaataaataaagaggaactcagaagtctgagcaatagtcagaaaaaaataggtgagagtactgtattacagacagatactttatatgaattctttatttgggtgagtctgagattaaatctgtggctttgcaagaaagaagttgatttcagaagagaaaaattggcagtgtaggaatatctaaaaggcaagggagaaatgctgattgcgaagaggagtttattcagaaagaacagtaatattatgatactcattattagaaataatgtgcccctatattaattactatgttgggtacttttttttatttttttatttttttgagacagtctcgctctgtcgctaatgctggagtgcagtggcttactcggctcactgcaagctccgcctcccgggttcacaccattctcctgcctcagcctcccgagtagctcggactacaggtgccccccaccaggcccggctaatttttttttggatttttagtaaagacagggtttcactgtgttagccaggatggtctcgatctcctgacctcatgatccgcccgcctcggcctcccaaagtgctgggattacaggcgtgagccaccgtgccctgcctggtattttttttatagttggcattcctggtacatccatcttattagtcgtgcacataattgtcctaaagatcctgcctttgggaagtgaacattctttttcttttttgaaagagtcttgctctgtcgcccagactggagtgcagtggcatgacctcagctcactgtagccaccacctcctgggttcaagtgattctccagcctcagcctcccaagtagctgggactataggtgtgtaccaccatgctggctaatttttgtattttttcagtagagatgggtttcgccatattggccaggctggtctcaaactcttgaccttaggtgatctgcccacctcggcctcccaaagtgctgggattacaggcctgtgccaccacgcccagctatggaaagtcaatgttctataatggggagaagacagaaaataaatatgtaaatatgcgtgtgggtagggcaggaggtgtgataagcatttgggaagtagtcagggagggaatcactagtaagccaagaacagaagggagccaggcttgcaggtatctgggggatgaagattcaggcagaggctaccacgggtgagagaaccctgagatgagagcaatcagatcacatctggcctgtttgaagaacaaggaggtcagagtgacaagagcagaatgagtgagggcgaatgtcctaggaaatgaggtttagggcaacttggccattataggggttggtgttttcggtttctacttttttagagaaggaggcctcgctatgttgcccaggctggtgttgaacccctgggctgaggcgatccttctgccttcatctcccaagtagctggcctcttaagtagctcagattacaggcacgagctataggacttgggtttttgtttttttgtttttgttttgagatggggtctcgctctgtcacacaggctggagtgcagtggcataatcacagctcattgcagcctcgacctcccaggctcaagtgatcctcccacctcagcctccagagtagctgggactataggcgcatccacgacacctggctaatttttttgttttttgtagaaacagggtctcactgtgttgcccaggctggtcttgaacttctggactcaagtgatcctcccacctaagcctcccaaagtgttgggattacaagcataagccacctcaactggccaggacttggcttttaatcctagtgagatgagaagctattgggggttttgggcaaggaagtggcatgagctgacttacatattaaaagaatcattcttgctgctgtgtggtgactagattgggcagaagttaggagacagttgagaggtttttgcaataatccagaaggaaaatgatggtgatttgaactaagatcaaggtggtaaactgggtgtggtggctcatgcctgtaatcccagaactttgggaggctaagccaggtggatcacctgaggccaggagttcgagaccagcctggcaaacatggcgaaaccacgtctctattaaaaatacaaaaattagccgggcgcagtggcacgtgcctgtagtcccagctactcaggaggctgaggcaggagaatcgcttgaacctgagaggcagaggttgcagtgagccgagattgcactactgcactccatcctggacaacagagcaagactccgtctcaaaaataaataaatacattaattaattaaaaaaaaagagagagaggagctcagttttggataaatttgaggtgactgtcagatatccaagtgacaagaaggcaagttggtgttcaagtttcaagttaagaggtgtcatttgggcctaagatttgaatttgggtgaggtgcagtggttcacgcctgtaatcccagctaaggcaggaggatctcttgaggccgggagttcaagaccagcctggacaacatgtcaagaccctgtttctacaaaatatgttaaaaattagctgggtgtggtatgtctgttatcctagctactcaggaggctgaggtgggaggatcctttgagcccaggagtttgaggctgcagtgagctatgatcatgccactgtcccctgtggctaatttttgtattttttctagtagagacggtgtttcaccgtgttgaccaggctggtctcgaactcctgacctcaagtgatctgcctgccttggcctcccaaagtgctgggattacaggtgtgagccaccgcactggccaatttattgctatcttacttatttaaaaaagaaactatacctttggccacagaacctccagttttttttctatgtgaagcaatttgtaacacatcattgtcaattcacttttattttatgggcatttactgcaaaaatacaagcaattccacatcaaagacattgtctatatttaacagaggcctgatagatgggtgggtctatacataagaattgccttgggacttcctctgtgtcattaagaaagaatttaacattagcttagtaaccaaacaagatcaaatatacaggtatttaaacacaaacacacacacaaacacttagcctttgttggaattaagcaagtaatatttaataaaacaaaaattaattgtaggctgggcacagtggttcacactatacccagcactttgggaggccaaggtagttggatcgcttgagctcaaaagtttcagaccagcctggataacatggcagaatgccatctctacaaaagaaatacaaaaattgcctggcatggtggcatgtgcctgtagtcccggctacttgggaggctgaggccagaagatcacttgaacctgggaggtggaggttgcagtgagctgatatcatgctgctccacagaagcctgggtgacagagtgagaccctgtctcaaaaaaaaaaaaaagaaaaaaaatgcaagaataacatttgatttttaaaatgttataaaaaagaggccatgttggccgggcaccgtgggtcacgcctgtaatcccagcactctgggaggccgaggcgggtggatcacctgaggtcaggagttcgcgaccagctggccaacacggtgaaaccccgtctctactaaaaatacaaataattagccgggcgtggtggcggatgcctgtaatcccagctacttgggaggctgaggcaggagaatcgcataaacctgggaggcgtaggttgcagtgagctgagatcaagccattgcactctagcctgggtgacagagcaagactccggctcaaaaaaaaaaaaaccaaaaaacaaaaaacaaaaagaggccatgtcaaaagcacataggagccaaccagaaagagctcccaacagccaatgctggaactgtctgagcagcaaaataaataacataatgttgattataacttgaagtatagaataaataagcacaaatccacacagatatatatatatatatatatatatatatatatatatatatatttgaataaatatatatagagaagggacaaatcttttttttttttttttgagatggagtcttgttctgtcacccaggctggagtgcagtggcatgatttcggctcactgcaacctccgcctcccagattcaagcaattctcctgcctcagcctcccaagtagctgggactacaggcgcgagccaccacgcctagctactttttgtatttttagtagagacggggtttcaccatattggcgagggtggtctcgaacttctgatctcaagtgattcgcccacttcggcctcccaaagtgttgggattacaggcgtgagccaccatgcccggccttcattttttaatcgtcagaaattcctgttagtacacttttctttcagaggctgtttacagaggtgggtcaagaccttattagttttttcacacagacatggaggattaaagagatcatcagaatgcctcgaagagaataggttgacagtcttcttagattatcttggtgtgccataccccctcctgcgttttgagaacccctgctttcagagactgtcacttatctgagaacagatgctgtcacagacatgcacagcctcatattcttttcctctttgtcttatcattcctctctggtaactttactgttttgttcctctttttgccttttgtgtcccacccccatttaaaaaaatgtgatgatcagccacggcagattgtacattgttaatggaacatcatgactgtccataatgatgatagcaacagcttcaaggctcttcgtaagtagatattgcgacttcattggttgagaagaaacaaagatacaattcttgccagacacttgctgaggacaggacttaaaaccacagtgcttggccagtagatggcgcgccccgccctcagtgtgcatgacttatgaatgaatatgccctccctatgccctgcaccagcccctcccgcctctgctagcccctccagctcactgctatcagaaccactgtctgaagcgcagattgccaaggcctggctttaaaatggtgtcatggggattgaattggggagagggattctctgtgaaggcaacgggttgaacagcagaagggttgagctagaaaggtggccggggaggaggggcttttgcagccaactgactcgtctcatttggctggagttgggctgggaagggtaatggactaatgtgggaaaggtagatccagagccttgaacctcctaccaaagcattttgacttgctcagtaggccatagagaagccctaaaaggtttttatatatttttaaattttagagacagggtttcagcatgtttcccaggctggtcttgaactcctgggctcatgcgatcggcccacctcccctcccaaagtgctgggattacaggggtgagccaccgagcccagccaggaatcactaaaaggtttgaaggtggcaggatgagagctgtacttgcacaagattaatatgaccaggtttgcggatgcaatgaatgaaaagaaaatgagaatccaatggagaagtcaccttacaacaggaggggtgggctgggcgcggtggctcacacctgtaatcccagcactttgggaggccgaggccatcacctgagctcaggagtttgagaccagcctgaccaacatggtgaaactccatctctactaaaaatacaaaattagccaggcgtggtggccggtgcctgtaatcccagctactccagaggctgaggcagaagacttgcttgaacccgggaggtggaggttgcagtgagccgagatcatgccattgcactccagcctgggcaacaagagcgaaactccatcacaaaccaataacagcaacaagacggatgatggaggaagcatatatgtgacaatttacagttcgggaaattcagagaagtagctcctcaacagtgtcacccgtcagtagaatacttccttccagaatcagtgtcaggaaatgtccaggaagccaggaactgagcctacacatcccgatgtcccaagtgcatgcgcatgtgtggctagccaatcccttgccttcctgcctctgggaagattattaggtcttccatttgttttcaagtaagaagcaaaaaaaaaaaaaaaaaaaggaaaaacagcttgagtttctttccatatcacagccttccaatgtgttattattcaacactgcagtgtcagatttagattttccacctcgaggaatttggtttagctttaattagttgctgtgaatatttctgagccaactctggaaagcatttatctggaaaatagtttccactaaaatataagctggatatagggtatcattttcctaggagggtttgtatcagttaacagttataaattctctccagccctctggatgacttttgccacaagcccatcatcgtcatattggttaattacttattaattaaacacaattcaaaatactgtattgaggcatctgcatcgccatctaagctctagcttcaggacttcagagcgtgaagatttttcggagaaaagataacgcttacaggttattctcatacaggcaactgatgcatttttcatccggcaacttttcataaaaacaagctgaaaaataccagacaaatgaaaaacagacttcagcagttccatgctgcttcctgagtaactgaagaatgtgcttcttgtggttaaaatgagagatctgtttaatatggatcaaatagcaacactccaggcattttcattgacatttcactgtgactttttgaacttaggagtgcggatacgaaaacctactctttctttctgctgcgcggagcctgcacaatctgcagaaagattgcagagccgggccaggcgaggtaacaggctacgtggggttcatgttctctctggttgttccctccccgtttgtacttcatttccattcacacggctgcacttcccagttttccaggatctctcctctgaaaccaggcaagggtttgttcccaaatcccacccattgcctctccagccccagacttgcttactggaccacacataggtggtgggcattggtgacttgtccctagggtcaggggaccagaaacttcccagaggggctggatggagcacggcagcactcagggcacaatggagagcggattcaaagggcaaaggagccgaggaaagcccctctgcccgagcctccccagcgccggccgggctccgctccggagcagccccgccgtctggcagagacatgctgttttgtttaaatcctccacattctttgccatttccccattggccggatggggctaccctccccgccgcggccgctgctgatgtcagcctcgctcgcgctcgctcctcccgcacccacctcccggccccaggcacactgcatcggcgcggacgctccggccccggcgaggtggctgcaaactcgcgggcacgcacggcgcccggggagccgagggactcgggggaggggacgcgcgcggaaggcgccagcttcctcccgcccgcccctggcagccgcgagccgaggttggaggcgcccggggccccagccgggcagagccgagcggcggcggcggcggcggcttcccttttctccccgagccgagccccggagcggcgcggggaccggccctaaaaagagcaggaaatcttgtttaccgcccgcggagagaagccgatcgagcctttgtctggaaagtcagcatctccggctccggctgcaatgtgttcctggtgacattagcatcgggcagacccgccggaggaggggggtcgccaggttcccgtctgctttcggaggcggatcgagcgggtgacttttgtgcattcgttttaatttttggaaatctctcttttttcctccctcgctcgctgccgggcatgtcctgatctggcggccgctcctaccaccctgggcagccgagcagagtcgtccccagcgggtctccctccctgcctccctgactttgcaacaccgcgttccgggaggaccggcctcggcgagggaggaggcgggggagctgcgaacacccagacccaaaccctgacatgctctggggcggagaggaggaagccaggagctgagcgcgccgcgggggctgcttcgccctccggctccgagcgccgggctccgggcgccctgccctgcgcctgggcagcagccttgctggtcttgggggcgccccccgcttcccgccccgggggtccgcggccggcaggaccatgctgctgaaagagtaccggatctgcatgccgctcaccgtagacgaggtaagcgccgcgcccggcccggcctcgcccgctccgggacccccgccgctaccgccgcctcctggccggcgagccccgggcgagcggcaggaaacccaggtggacgttaccccgcaaacccgaagcctggaggagaggagggaggggatttgcggcttccacttgtcaccccagcgggggagggcggcgctgggtggggcggcggactccgggtgggcttttcgggggcgcccagaatccagactgttggggatcactatgagccaaagggagtgggtgcgccccctccctccaaataagaaaatgaataaaccaaacccaagagcccccggcgcgcgctgtagctggggtttggggggcatcccgtcctggccgtgggcccagcctcccctccccgccctctgcggtcaggtaggggtgcgaggaggagccctgcgccctcgggatctgcacgccccgagccccgcgggaggaacctctgagcccttaggggaggtccctgcggggcccgacttctcgccgtcgccgcgggcttgggcgcagctcccggcacgtccgcccttcgaggctcgggacccggctgtgtcctttcgcaaaccgcctggctcggaaactttctgcgtctcttgtttcttccgccgcggggagcggcgcgcgagccgggagcggcgggggctgcgacgcggccacaggagggcgctccagcacgtggtgccggggccgcggctgccggctgggggcgccgggcgcggggcgggggctcgtcctccaagcgcggctctgctgtccttctcccgatcctgcgaagccgcgagctccagtattcaggaagtggtgactcagataggattattccggccccggcttccctttcttccccttcttcctccccacctttgtggtgattccacgactgctgagcgtctctgtccagggacagcgagggagcccaaagccaagcaaggcaacgtgaaactcactagtgtggtttggtgtggcaacacacatgaaatcagccacccagaccgtctttatatttaaatctggtgcctcgaaactatcagatatgtttttgagccactacttggtgagaggggcgatgtgctttgggagagaaaaagatgcataactgagaacatggctgagctcacaggggctgtccgtatttgccatctggaccaagggttaaggtaagacccaagtacaatccaagacaagatcaaagtagctgcaagtttacaaaacgcatcacggggacacaggctgccaaggagggagagatcagcttccaccagaatgaacaaccgagttttggagttcgttggcatttgaggaggtagcatttaagcagggtctggaagggtggatgccaggtgggtagacagagattcgagttgcatatgaccttgtaagtggagaagcaggacatagctttgtggagaaagagaagggcaaatgaatgggactggttaataggagtctttccagaaaaggtggagattgtcccaccttgtgggcagttgagctagagtaattcagctgggaggcatggatccctctactccatatcctaatgaccttgttttttgatatgagtttggattctaggagcaatgttgggactgcatgaaatacacagaaaattgcaggtgataatcaagaaaagaaccagttctagaatcttctctactaactacaaaatctctttatcctagttggttcccttttcaggctttctgaaacactcaggcagatgcttttcccacttttgtttttgtaccgaaatacccacaggtataccgtggggtaattacatttgaatgatataggtggaggcccttccttccttccttccttttttttgtcttttcttttcttttttttttttttgagatggagccttgttatgttgcccagggtggggcgcaatggcgagatctcggctcactgcaacctccgccacctggattcaagcaattctcctgcctcagcctcctgagtagctgagattacaggtgcctgccaccacgtctggctaatttttgtatttttagtagagacggggtttcaccatgttggccaggctggtcttgaatgcctgacctcaggcaatccgcctgcctcagcctcccaaagtgctgggattacaggcatgagccactgcgcccagccagcccttcctttcttaattggccaacaaaatcagactcatcagactccacctgtaatataattataaattctttaatgtataattcattttggccaaagtatgattcagtttctgtaaggttcatattctgaagtcattttcggctttgtcagagaagcaggagggcaatttagattaatagatgtttccaattagtaggattcagattagctaaatctgatgatggatgaagaaatgaggcctagtttgccagatgttaaacccctagagtcagaactgatagtaaattccacagtctccaccatccccttttccactgaccctttttccacattgaaaatgaggaagcaacttgagtttctttaaataagatgtttaggtaaactttggaagcctaactttttttttttctttttgagacacggtctcgctctgtcatccaggctggagtgcagtggcgtgatcctagttcactgcagcctccatctcctgggctcaagtgatcctcccatctcagcctcctgagtagctgggacaataggtgtgtgctgccaacccggctaatttttttactttttgtagagacagggactcgctgtgttgcccaggctggtcttgaactcctgagcttgagtgatcctcctgcctcagccttttaaagtgctgggattgccgggtgcggtggctcacgcctgtaatcccagcacttggggaggctgaggtgggcagatcacgaggtcaggagatcgagaccatcctggctaacacagtgaaaccccgtctctactaaaaatacaaaaaaattaagcaggcctggtggcgggcgcctgtagtcctagctacttgggacgctgaggcagtagaatggcgtgaacctgggaggcggagcttgcagtgagctgagatcacgccactgcactccagcctgggcgacagaacaagactccactcaaaaaaaaaaaaaaaaaaaagggctgggattacaggcatgagccactgcgcccggcctgggagcctaacttttgcttccactcttggttggctctgggcctgattcaacctacatggaacttctggaacttgtttctctctcttttttttttttttttgagacggaatctccctctgtctcccaggctggagcgcagtggtgcaatctcagctcactgcaaggtccacctcccgggttcacgcgagtctcctgcctcagcctcccgagtagctgggactacaggcgccagccaccgcaccctgctaattttttgtatttttagtagagacggggtttcaccgtgttagccaggatggtctcaatctcctgacctcgcgatccgcccgccttggcctcccaaaggcgtgagccaccgcgcccggcctacttgtttctctttaatcaccagagttcattggtagcagtgtccatacttttgaaaatgaagcaaatgctcatgctttgaagaatcagtgagagaacccacactttgcctgcttcttgtgcctggccttatcccttctccctcatttaacactctggtggtggcgggcggtggagcattagtggcactggtgtgttattatctatattttgcagatgaatacattgagattcagaagggttaggtaatgtgctccaggccacacaactagttaatagccaagccagaaggagagcatggtgaaacccattatttgtttttccttactctgctttttgcctgtcactagtgtttaatccagcaaaaggaaaaacatttcttgaaaacagataaagtcagcactatcaagtaaatgaaaaatcagaggccttttgacttgctatagacggtactggcctctactatttctctagctttattttaacacataaaatgttctctagttccaggaaaaaagaacagctctgggcgatcaagaaaataaagctgaactactgtctagattagagtgttggtggggttttttggtgtgtgtgtgtgtgtgtgtgtgtgtgtgtgtgttttagacattaatttcagagtaaagaattaataaaagtaacattccatagattaattttaattaaaacatttcattggaatagtccctcgtttgtgttaaatgtggtggtctctgaactcaatataagcctgttggaaaggtatgaacaggaaaagttcctgagagctgagagttgctatagagagaaagttgtcattatcttcatttgaaacatttggtagacgtagatgtagattctagagtttttgtttgtttgtttctttttctgagccacactctctcgctctgtcgcccaggctggagtgcagtgggatgatttcggctcactgcgacctccaccgcccggtttcaagcaagtctcctgcctcagcctcccgagtagctgggattacaggcgcccaccatcacgccaggctaattttttgtatttttagtagagaaggggtttcaccatgttggtcaggcttgtctcgaactcctgacctcaggcgatccgcccactttgggctcccaaagtgctgggattacaggcatgagccactgcccccggatgattctagagttttagacttagaaggcgtattggagatgatttataattgagccatttatttatttatttatttgtttgtttatttttgagatggagtcttgctctttcacccaggctggagtgcagtggcgcaatcttggctcactgaaacctctgcctcccgagttcaagagattctcctgcctcagcctccagaatagctgggatttacaggcttgtaccaccccagccagctaatttttgtgtttttagtagagatggggtttcaccatgttggtcaggctggtctcgaactcctgagagttcatgcccggtgagccatttcattttataatgaagtctagacctgtagtaggtgcagttaagttgtctacctcattgacaaactctaggctagaaccaggtctgatttaaggctcaaggctgttctactatatggaattctccctcctctgagattccttggtggaagaaaatattctcctgaggacccatgtgtaaagcaggtacactggctctactctctagttgaaggtggctggggactccaaccttgtgtctgcttagcgggacacatagggtagccccattggaacctattggaagggtggcccacctcctcccgcagccactcggtcccagtgagcgacctgctcaccaaggaggctccttggagcacagtctgaagatcaccctgcacctgccaccctcgccacagaggtacttgttagtaaaatgagcgtctctcaagagacgctaagcacatcctaatattatctaaggcaggaatccttttgttttcattgctttctttactgtttaaccgttctggccaggcgcggtggctcatgcctgtaatcccagcactttgggaggctgaggcgggtggatcacctgaggtcgggagtttgagaccagcctgactaacatgagaaaccccgtctctactaaaaatacaaaattagccaggcgtggtggcgcatgcctgtaatcccaggtacttgggagggtgaggcaggagaattacttgaaccagggaggtggaggttgtggtgagctgagatcgcaccatcgcactccagcctgggcaacaagagcaaaactctgtctcaaaaaaacaaaaacaaacgaacaaacaaaccaaaaaccagttcttgtttaacagttcctgttctgactgcattcacataaatgtgtatacttttagggattgatttgtggtctctagggatatggtgcacaatgcagaaaaatagaaacactcccctcccctccgagaaaagagaaggaaaggaaagaaaagaaaaacaactttttcatacagaatattattttcttttttgccctggcagggagccagtgcacttcatccaggcacccccagggtccccagagagttttcttgcgcacatttctgagaacggatttgggatcagggtggtgctgcctctggaatgacatgaatggaaatgccaaaatgcccaacagtgttccttgttctctttttttttttttttgagacggagtctcgctctttcgcccaggccagagtgcagtggcgcgatctcggctcactgcaagctccgcctcccgggttcacgccattctcctgcctcagcttcccgagtatctgggattacaggcgcccgccactgcgcccagctgattttttgtatttttagtagagacggggtttcacccttttaaccaggatggtctcgatctcctgacctcgtgatctgcccgcctcggcctcccaaagtgctgggattacaggcatgagccactgcgccgggccttgttctcagttttaaaccattttcctgaaatgcatctgcaaacatatcaaggcagaaattattgaaaggaagagattttaagtttgctgctggcgtcaatacctctgaatataaaggataaagactccttggattaatctcacagactttccccaaggtttcttgtaaatgtaatttggaaaatgttttccttgtctggtataaaaattttattctgaataagataattctataaaaagttttctcaagaacgagcacaattttgagaggttgttttattttattttaaattttctgttgagaagggaccaaggtcagggtcatgcgtgtgatttctgtgtgatccaggtggtttccttggtggcttgttctgggaggtgaagccagttggacttcttggtccggtggggacttggagaacttttctgtcttacaagaggattgtaaaatgcaccaatcagcgctctgtagctagctagagatttctaaaatacgctaatcagcaggctgcaaaaacgcaccaatcaggtctctgtggctagctagcggtttctaaaatgcgctaatcagcactctgcaaaaacgcaccaatcagctctctgtggctagctagaggtttgtaaaatggaccaatcagtgctcagtaaaatgcaccaatcagtgctctgtaaaatggagcaatcagcactctgtaaaatggaccaatcagcaggacatgggcggggacaaataagggaataatggctgaccacccctcccccctcccctccccccaggcaccttccaggctgtggaagctttgctcttttgctgttcactcttttgctgttcacactaaatcttcctgctgtccgctctttggtccgcaccacctttaagagctgtaacactcaccgtgaaggtccgcggcttcattcttgaagtgagcgagaccaagaacccaccggaaggaaccatctccggacacagttccacagccaggggacagtggaggtttggctagctgtctggcaaagctccggtttttttttttgtcataacgggcacagggaaaggagggcgggtaaatagatttgtgcaaacctttcaacactaatggaacagacaaggagcagatgctgtcctcctggctggtcagtgaaattgactctgtccatgaaggaagctgcattttcccagtgacttgggtggaagtacctggcgcaggagatagatacagggatcagggaagcaaactgttgttaacaaaaccctggttaaaagtaggtagtaattaacttttgctttttcttattgtgatatggaggaagttcctaaggctcttgaaagtcaatttagaaaccttgtgtctgattgcgtgagtgtgactgatactccaaagcaaagcgagtaatattcatttcagtaaggctgtcgtttcaggcgaatggagaatattatttattgtaggcattaaaagaaattaatatactttatttattttgagacggagttttgctcttgtcgcccaggctggagtgcagtggcgctatcgcggctcactgcaacctccgcctcccaggtttcaaggggttctcctgcctcagcctcccgactagctgggattacaggcgcctgccagcatgtccagctaatttttgtatttttagtagagtcggggtttcaccatgttgtccaggctggtctcgaactcctgacctcaggtgatccacccgcctcggcctctcagagtgctgggattacaggtgtgagccactgcgccccgcctaaactaaattaatatagtttaaacattcaacctctttaagagcttcccctctcctagggatgtgtaggtatgagatggggagtggggaatcacaacgttttgggtttttaaaaatgtgaaagtgtatgcacaaaggcagtaaatgtgtttttcagaagcagtaattactggaaaagtacatctaggttcattgctttagcggcctgagtgagatcgcagcaccctggctggcttgtgtgggctttggcctgttttctgttgcctggaggtctgtagtgttaggcaagtctgaaaactaggtaacacttttgccctgtatcagagaaacagactgagttctagaaatcagctaacttgtactgagaaggttttatgtatctttaacaaattcagcccaccgggagaggaaaaggagaatttcagactagaaatcaggaattttgtatattcccaagtgaagatttttcttgtaggttacaaggaggatgaggcgcaaatatattacaaatattaaaacggacaaaccaatcgtatctggaaaatgtagagttgtctggaaaaataatcttggaaactttactttttgtactatgcaacctctaatttacaaataacatccaaatcattcaaacgaacagcgtcgcagggctgcacaccgccagggggcgccatttacatgggacccagtgggagtagagcagtgtgatggcctgcaactgaccaacctgccttttactgccctttcatgctcccagcccctgctgctctcctgggttagaaattgaaagtttataccaaactcatgggtttacaagtggaaacatcacacccttagcatcgtctttcctgaacactccatctacaatagctttttcctcatctaaatctctggccaggcacagcggctcacgcctgtaatcccagcactttggggtgccgaggcagacgggtcacttgaggtcgggagtttaagatcagcctggccaacgtgatgaaaccccatctctactaaaaacacaaaaattagctgggcatggtggtgggcgcctgtaatcccagctactcgggaggccaacgcaggagaattgcttgaacccgggaggtggaagttgcagtgagctgagatcgaggctgcactccagcctggctgacagagcgaaactctgtctcaaaataaaatataaaataaaataatcttttccttaatattctcgctatttatatcctctattatctgcctctccacgcctgtttattccttcagagcatttatcgcaatttgtacttattttgtttaattgtttgttgtctatcgccatcattatcttttcaacatgtaatccacatgagaaaatactgatacaatcttttcacttatttttttcacactaagtctttgaaatcaggtgtgtattttccgtggacacgcatctcagtttcactggccgctctgcagtgctcaaggaccatgtgtggcttgtggctgccatactggacagtgcaggtctggtgcttaaacttagggtccacacatagtaaatacttgctgaatgaatggataggaagaagctgaggaaaacaggaactttttaaggaaccctgatcctctatgtcctcctgtaaaaggtttaaaattttttcacttgtatactgcctgaaattttaccaattagagattcttttgtatttaatacatcctcattaaaaaatttcttagtgatacccctgagaagtttgaaatcagtcacatatatttaggagttattgccgtcagactgctttcctcccaattcccggaggagtatgtatattagttttcgtttctttttttcgtgtttttttttttttttcccttggagtcttgctcttgttgcccaggctggagtgcagttctttcagctcactgcaacctctgcctcctggtttcaagtgattctcctgcctcagcctcccgagtagctgggattacaggtgcccaccaccacgcccggctaatttttgtatttttagtagagacgaggtttctccatgttggccaggctggccttgaactcctgacctagtgatccacctgtcttggcctctcaaagtgttgggattacaggcatgagccactgcacccggcctcttttgttttttactctgagacatagtcttgctctgtcacccaggctggagtgcagtgtgcatgatctcgactcactgcaacctccacctctcgggttcaagcaatcctcccgcctcagctttcttagtagctgagactacagactagcaccaccacacctggctggtcttgtatttttagtagagacagggtttcaccatgtaggccaggctggtctcgaactcctgacctccggtgatccacccgcctcggcctcccaaagtgagccaccgcgcctggcagtatattagttttctattgctgtgttacaaatgatcacaaactcagtggcttacaataacacccatttattagcacacaaattctgtgggtcagaagtctaggtgcagcatggctggattctctgctcagggtctcataaagctgacatcaaggcgtcagtcaggctgcctttctttctggagcttggagttgtcttcagggttcacatggttgttggcagaatgcagttccttactgcatccatcagttagaggctcgatcccagaggccacctgccgtgtcctgccatgtggccctctccacaacatggcagtttgctcttgcaaggctagcaggagcttctactgcaacttcagatctctccgacttgctgtctctgacttcttgattcttttccaaaagggctcaccaatcagtgggaatcttgggggccattctgcctctcctagggagattagctgaattagagaagtagttatttcttgaatctggaaaacagggctatggaagttccaggctggcatcatgaaaacatccattcacagatactttattgaactcctgctctgtgccgggtgctaggcctgcagcggctgacagggcaggtagatccctgccctcctgaagctcctaggccagaggacactggagaggttttattgccatttaaaaatagatgatggccatagttgcacaagtctgtaagtgtattaagaaccattgaattggtatgtaaagtacatctcagtaaagctgttttttgttttgttgttgttgttgttgttgttgtttttgagatggagtctcactctgttgcccaggctagagtgctatggcgcaatctcggctcactgcaccctccgcttcctgggttcaagcaattctcctgcctcagtctcccgagtagctgggactacaggcacgtgccaccacgcccggctaattgtttgtatttttagtagagacggggtttcactgtggtagccaggatggtctcgaactcctgacctcgtgatccacccacctcggcctcccaaagtgctgggattacagacgcgagccaccgtgcccggccaaagctgtttttttagaaatagaagtgcttacagatttgtttgagcagaatagatacccatgttcagagagagagagagagagccattgagaggcagagagtgccgaatgtgaattctgtgtaaattgaaaagttacggtccccgtccataaggagatggctctggttgtcttgaatttagacagctttccagaggaggaggttctctcctgcagcagtgtgggaaaaaaatctaccagatttggaccagaatgactgcaatttaggtcagaacatgatacttagagggaaaaaagtaatcatggcttgaatagctgccctaaggccagctacagggctgcaggggtctgtggaacctttcttgtcagaactcaggatccttaggagtccccacaagggcatggaggctgtggccatcatgagtggaagaaccagcttccaaaggaacctaggattgttctggccctggctccaggtgcatatctctgctttccgtgagcattgaatgggaaatcacgtgttagcagaataaatcccagaatacacattcaggaggagatggttccacatggcacgtaagtcctttgccttattgatgtttgtctggcagatgtccttaagccttcccatcaagggctttattctaagggtggctaactggctatttaaacctcatctcaatagtgtctgtctaggatggcaaaatcacaccaggttctgctgggcaaatctcccaggtggcgtattgctagaggagagcgccactgcagaggacacactgtcttggccactggctttgcaaaccatagtggaggagggagtctggggtcaccaaccacttcctggctgactgcctgagccacattatacaagactgtttgttgacttagtaatactgaagccagagctcaccaagattctgacatcaagcatgaaagtgactaattctttcatttcccagcactttgacaaaggggactctcttaaaactcctcatcggacgttagtggaagtcgactcatgtatctaaacatgtagccagcgtaagttcttggtcagattgatctaatgacttttttagcgtgtgtgtgtgtgtgtgtgtgtgtgtttaatctttttaagtttgggtgaagtttgaccttctagaattcctgtttattcctgagcaaagaaaaaaaaatcaaccctttttaattcctttagcatcatatctgaccatctttagggtgttgtttctttcctagactgaatcactcagagaaataagattggccaacaaatgtaatttgatgataccctataataatgttgtttaagtacctaatctaagccgctaatctccaaagactgttcccccgccccatgtcatcttacacacacacacaggcacaaaaacacacacattctgttctgattatatttgctgtattaaggccaaatccaggtgtttctgagcactagtttgtgtgtttttatgttgaaaataactagtttatgtatttatttatttatttatttttgagatggagtctcacattgtcatccaggctggagtgcagtggtgtgatcttggctcactgcaacctccgcctcctgggttcaagtgattctcctgcctcagcatcccaagtagctgggattgcaggtacccaccgccacgcccggctaatttttatatttttagtagagatggggtttcaccaggttggccaggctggtctcgaactcctgacctcaggtgatctgctcacctcggcctctcaaagtgttgggattacaggagtgagccaccgcaccgggccaaaaaatccaatttcttagagattaaataacccttcaggattatcaaaggaaataattagggaaaggtagatgttctgtcccagtaagagaagaaagtggtccagaaattttatctcccatcaaatgatccattttacttaagtattaaaccaagtgacattcttcagtttaactctgataaatgaatcatattcctcttcgaaaataacttttgtatttcgtgctctaaaaagagaaccacccctacactcttggaaattattccttttaatggcagtaaaaacctttggctttcataggcatcatcagcagagatgttagttcatgagcacctgtgagtttctcaaaattagtatctgaaaatgatgggaacacacaagcgataccatcatgtctttggcacatttagttgaaaacttaaaattcttccggtggaggtaagcaaattggaaggtattaaaaatgatcagagtgtactattcagagttatagatttacccttccatccaagatggctgcgccttggaaacccccagctcacttttactagcagtgcctccagatccagtttctaaatcacacagggagattaacattattcttttatagtcacactgcatgtggactaaaataattttttttaaagagaccggggtctcgccatgttgcccaggctggtctcaaactcccgagctcaagtgatctaccagccttggcctcccaaagtgctgggattataggtgtgagccgctgcgcttggctaaaataaatattttaaaatttaacacgattattattttgaaattggaactctaaaagacttttcaaaattcaaaatgatcaggaatgttaaaaacaatgaaaaaaagcacccctaaacctgccctagattccccaggggagagtcaaagatgttttgctttgtatcagcactattgaaataaacatattgtcacctaaaaggaactatttgaagaggactgcacttcactggatgtgtatatcctggtgagttttttattaatgtttattgttttttaaaaaatgtgttaaaatggctgggtgcagtggcttacacctgtaatcctagcacttcgggaggccaaggcaggcggattacttgaggtcaggagttggaaaccatggtcaggagttggccaacatggtgaaaccccatctctactaaaaatacagaaaagttagccgggcatggtggtgcacgcctgtgaccccagctactcaggaggctgaggcaggagaatcgcttgaacctgggaggcagaggttgtggtgagtcaagatcgcaccactgcactccagcctgggctacagagcaagactccacctcaaaaaaaaaaaaaaagcagaaaaatgtgttaaaaatatacacataacatttgccatcttaaaacttttcgagtgtacagtttcagtagaattgggtacacttacattgttgtccagccatcaccaccgcccatcttcagaacagttttcatcttgcagaattgaaactctgtatccatttaaccctaaatccctatttctccctaccccaaagcccctggcaaccaccatcctactttctgtctctgtgaatttgactactctaggtatctgatcaggtttttttttttaattggttattacttatcattaaactcattcatcgtttcttgaaataaacccaataaactttaatggaagctcataagaatttttttctgaattctgccctctgtcaaaggaagaaaatgacaacatggacgcatatctgtatttgggtggcattaatgactcagtgaccttcacttttgcagccagcgaaatacttggcaattttaatttagaaatattactgtatcatcatttaacagaaatacttactaaagcagaaatatactgactttagaagcatttcaaagaagcagggttggcactgaccagtgttctcttaaggtagaagacagaatatttgactaaagacagtgctgtagcaggtagaaatagacattatttagaccccttttctgagtaaggaagaccagttaaaatgttagcttattttttgggattttagaaatgtttaactcaagagaaaaatataacttaagtcagtgtaatggcgtatgaataagttaaccgtgtaacattttcttttttcttctgcctcagcctcgcgagtagctgaaactgaacaggcacccgccaccacacccgcctaatttttgtatttttcacagagatggggcctcaccacattgaccaggctgttctcaaactcctgacctcatgatccacccatctcagcttcccaaagtgctgagattacaagcgtgagccaccatgcccgacccatcttattttttaaagagggagtttagtactgattcttagatcaaaagcagccaaatccccagtatcacagaagagatgagggtctggttatgtggcccaggctggtctcaaactcctaggctcaagtgatcctcccgccttaacctcctaaagtgctgggattacaggcatgagccaccaagcctggccttctttaacctttgtgttgtaaatgtgtaatgttttggtaacagtaagggttaaataaacaccttttctccctagtaggaaaatgcttctcagattggattgaaactctgaagaccaacatttttctagatactttcttggatagtgttcatgacaaactgctacttgaaagtggcaggaccattgtactataaaatctaataaagcccaggtcattggctatagggagttgaaagctctatttgtagacatcactaggagaactgacaagaatgaaaatgttacacagttaaggccgggcacggtggctcacgcctgtaatcccagcactttgggaggccgaggcgggtggatcatgaggtcaggagatcgagaccatcctggctaaaccccgtctcgactaaaaatacaaaatattagccaggcgtggtggcgggcgcctgtagtcccagctacttggggaggctgagatagaagaatggtgtgaacccgggaggcggagcttgcagtgagccgagattgtgccactgcactctagcctgggcaacagagtgagaccccgtctcgaggaaaaaaaaaaaaggttgccaggagcagtggctcatacctataatctcaacactttgggaggatgaggtaggaggatcactgagcctagaagttcaagaacagcctggccaacatagtgagaccccatatctatttatgtatatattttaaaagttatagaaaacaacgctcttattaaactggtaattagcaactaaagtagaaaaacatcactggatagatggctgagaaaagggatctgtaatcacctgcttatctggacaggttttttcttttttttttttttagagatagggtcccactctgttgcccaggcaccatcatgactcattgtagcctcacacttctgggctcatgctatcctcctgagtagctaggacaacgggtctgcaccaccatgtctggctaatttttttctttttgtagagatgggcggggaggtgtcttgttacattgcccaggctggtctcgaactcttagcctcaagcaatcctcctgtcttggcctcccaaaatgctgggattacaggtgagagccaccacacctggcctggacaggtagttttgaaaacaggggttatcactagagaagtctgtgcttgagctgaggagcatgtcttctgaaatgtgtaaatttcctatagttagttccctggtggcgtggccctccatcaagaacattttgctgagttttccctgacttaaaataataacagtgatgctggtgctgatgaaaagactgatgtggcccttacatcccacatgaatcatcattcgggattattgtagcctccataaaagtgacgcagtggatgaaagtggtttttctcaatacttaaaaacactgtgaaaatgagataggtttaaagatataaatgtgattttttaaatcctgcccccccacccaagtgccaggagtttggtaactagaattgcatttagtcatcggggtacagattgtactgtgcgggctggagactcaaaccctgggctattgaaggccatgacaaatgctcattttttaatattatgtttttgctgctcatgaagaagcatcatgttcaaaatgaaaaatctttagattcaggacttaatagttcacctcttttggattgcgtttgacggaaacttggacacagctgagtgtaattatgcttttcagcagcatgacttatagtactgcagatatgggcatactttgagatttttctttttgccaaaatttgtctgaaaaggagcttggtggtggttgtgtgtgcttgtgtgtttttaaggtaattaggctattagaggtccaaatggaataatccccttaagccttttcaggaaaaacactttggaaaggttaagtaaatttaaaattagccattatttacgtaggtgctcagccttttgaccatgttctctaggagttgtttcttttacatttaggttatgtttgtcagaaaccatcttattttttatttttatttttctttctttctttatttttgagatggagtctcattctgttgcccaggctggagtgcagtggcgtgatctcagctcactgcaacctctgccctcaggttcaagcaattctcctgccttagcctcccaagtagctgggattacaggcaccggccaccacacctggctaatttttgtattttagtagggacggggtttcatcatgttggccaggctggtcttgaactcctgacctcaggtgatccaccagcctcggcctcccaaagtgctgtgattacaggcgtgagccaccacacctggccttatttttattttttgagatggggtctctctgttgcccagactggagtgcagtggtgcaatcactgctcgctgcagccttcacctccctgagctcaagcctcagcctcctgaatagctgggaccacaggtgtgtgccactacactgggctaattaaaaaaaaaagtttagagacagggtcttgctatgttgcccaggctgtttttcaactcctgggctcaaggaatcctcctgcctcatcctcccaaagtgctgggattacaggtataagccatttcacctggcaaccatcttatttttttaaatttatttttatttatttattttttgagacgaagtctcactcttatcccctaggctggagtgcgatggtgtgatctcagctcactgcaacctctgcctcccaggttcaagcgattctcctgcctcagcctcccaagtagctgggattacaggcgcctgccaccacgcccggctaatttttgtatttttagtatagacggggtttctccatgttggccaggctggtctcgaactcctgacctcaggtaatccacccgcctcggcctctcaaagtgctgagattgcaggcgtcagccaccacgcctggccgtgaccatcttatttttttaaagagagagttcagtactggttctgagatcaaaagcagccagatccctggtatcacagaagcttcatcacggattcatctatttttcatctccagaatggccacctcagtgctgtcctggccaaaaatctgttctctagacctggagaaggaactgccctgagggtcttccacacctctctttttgagaaaagttaagaacaaagtaaaaagatgcagtggagaaatgacgtcgggggttaatggattgggattttagggctggagtccaggcttatgttgctctctgctgagctcaggatctgcactgaacatctctctaaatcatgggctggggtaaaacctgcttacactggctcagaccggaggactttgcagccacctcaagacacacgtttgggtgtgtcccatctccaatcaggatgttcaacttgctttcttggatctttttgaattgcgaatttggccatagctgaccacttgtttttgcatcaatacttcaaagggttcaaggccaggtgcggtggctcacgcctgtaatcccagcactttgggaggccgaggcgggccgatcacgaggtcaggaaatcgagactatcctggctcacatggtgaaaccctgtctcgactaaaaatacaaacaattagccgggcgtggtggcgggcacctgtagtcccaactactcgagaggctggggcaggagaatggtgtgaacccgggaggcggagcttgcagtgagccgagatcgcgccactgcactccagcctgggcgacagagcgagactccgtctccaaaaaaaaaaaaaaaaaagtgttcaaattttaagtcctggtaatttatcccctcccatagcaagtattggcgcaaaagtaattgtggtttcagaccatgaattttaaatcattgtaactaggcccaaatacatctttattaatcaaaataatcaacacatttttgccaatgagaaataagtttgttttttcctttaatgtaaaaatctgtgcttcgggattcagcgaactcttggaaagcatttttttcttcatcctgctggttgtggaagcgtttttctgtataaaaagttgtcgagatgcttgaagaagtggtaatcggttggcaagaggtcaggtgaatatggcggaggaggcaaaactctgtagcccaattggttcaactttctaggcattggttgtgcgacgtgcagttgggtgttgtggagaagaattgggcccttcctgttgaccagtgccggctgcaggagttgcagtttttggtgcatctcatcgatttgctgagcatacttctcagctgtaatggtttccccaggattcagaaagccgtaatggatcagaccagcagcagcgaccaccagtgaccgggatctttttttggtgcaagtttggcttttgggaagtgctttggattttcttctcaatccaaccactgagctgatcatcaccagttgtcgtataaaatctatttttcattgcacgtcacaatccgatcgagaaatggttcattgttgtggcatagagtaagggaagacaacacttcaaaacgacaatgtttttgattttcgctcagctcatgaggcatgcacttatgaagctttctcacctttccaatttgcttcaaaggccgagtaaccatagagtggttgacgcagagttcttcggcaacttctcgtgtagttgtaagaggatcagcttttttttttttttttttttttttgagacgcagtcgcgctctgtttcccaggctggagtgcagtggtgcgatctcggctcactgcaacttccgcctcctgggttcaagcgattctcctgcctcagcctcccgagtagctgggattacaggcacatgccaccacgcccggctaatttttgtatttttagtagagacggggtttcactgtgttagccaggctggtctcgaactcctgaccttgtgatctgctcacctcggcctcccaaagtgctgggattacaggcgtgagccactgtgcctgtcagagggtaaactttgatggttgttctcagttggtcgttgtcaactttcaatggctgggcactagcttcatcttcaaggctctcgtctcctttgaaaaacttcttgaaccactactgcactgtgcattctttagccattcctgggggcaaatgcgttgttgatgttgagagttgtctccgctgctttaccacacattttgaactcgaataagaaaatcgcttgaatttgctttttgtctaacatcatttccatagtctaaaataaaataaacagcaagtaataagtcattagcaaaaaaagtgaaagaatgtgcattaaaatgatgtataacataaccacatttatttaagaatgtattccaatatcaaatggcaaattccaacagtgcaaaaacttacccctgaaaacaggcatagtcactttcaaacttgatttttctttcattttactctaccttttcatttgatgaaacacctttgcattttatctccctgagccaaagtacctgtaagttgcccggagttggggttggtgcaatactgtggaagagtgtggacacggaagacctagtcagtccttgctgtgtgatatcaatgatttgattgagaaagactcattttcctgggcctcacctgtcaattttctcaactgtcaaatgccctcttttggcctgtattaggggctgatctcatgcaatacggagcctactctgcaaatacaaggggtcatggtcattgtccatttgtggggagtgtgaaaacacctggtgatcatgatgggctaggtactgtttcacactttaaaatgcctttattttagggggaccctctagtgccataggtattttggagtctctgctttccaaatggcctatgggaaatcctgagatgtccgtgggatctaactttgcccagtgggaatgttgtgtcatagtcataaaggcttaaggattagtttatttccagccctgcaggggctataaattgctactttaaatttcattccagcaccctgatgtttatgttgctatggtggtgtgtctcttgctcgggtgacaagattgccattggaaataggccaaaataacagcctaacaggtggctgtgctttgggaagtcatttgcaaaactattttgcgaagaagtctggtgcaaataagtcacatgactgtgcccttaactgtagtttatagtttagcatttttttaaaacgcattcctccccctttccgttttatatatagacttttttcctctttcaagtagtgccgtgctgatttcctgtagtaacacaaggaaagatttcagctcattttatttagcagtggatgtcctttccttattttttgtaaccagagccctctttctaaaaataacccttcttttcctaatgtgattcttcttatagctgatgtactctatttaaatgaaaggcctctttttaacatgcccattttaatcgatatatatttattacatataactatatataataaaatacatatataaatatataataaaagtagatttccctgtagggtctaatccttcgtgaatgtggtagcagaaattgttcgttacgctttcacctgccaattatgattgttttctttctttctgtttttttttggagatggtgtctcactctgtcatgtcacccaggctggggtgcggtggtgccaactcggctcactgcatcactgcaacctccacctcccgggttcaggcaattctcctgcctcagcctcccgagtagctgggattacaagcatgcaccaccacacccagctaatttttgtatttttagtagagacggggtttcaccatattggccaggctggtctcaaactcctgacctcaagtgatccgcccgccctggtctcccaaaatgctgggattacaggcgtgagccaccgcgcctggccagttttctttcttttgagataaaatcacggaaagaacctgagtattaaaccagttaaacttcctacccacttaagagtcctttctatgataatcttggatggcaatcatcttgcctttgggcttaataccagccatcgcttgggtgtgggctctttttggtaatacaacctctatgattttccactttgatttgttggaagatgctttctcatgtttagttggtatctgactccttagagctttcaggatcgtttctaccactatagtgacaaacacaagccctttccacatgctgactctttaaacatttaaagaaatctataatgttggctgggtgcggtggctcatgcctgtaatcccagcattttgggaggccgaggcaggtggatcatgaggtcaggagttcaagaccagcctggccaagatggtgaaaccccatctccactaaaaatacaaaaattagccgggcctggtggtgggcgcctgtaatcccagatactcaggaggctgaggcagagaattgtttgaacccaggaggcggaggttgcagttagccgggattgcgccactgcactcaagcctagaagacagagtgagactctacctcaaagaaaaaaaaaaaagaaaagaaaagaaatctagattgttctcctttgatcttctcttccactggcttgctactctcaattccttcagattgaatttatgaaatgcttttgtctccctcaccattcctgtggttcctctttcttattgccctttagaaaatattgaacgcaatgcgttacagcagaggtcaactaactttttctgcaaaccgccagatagcaatattttagacttgcaagccgtaaggtctctgttgcaactactcaactctgacctcgtaacatgaaagcaggcatagggcaacatgtaaatgaataggcgtggctgtgttccagtaacattttatttgtggacactgaaatttgaatttcataaaattttcacatgccacgaaatattatgtgccttttgctttttcttttccaaccatttaaaaatgcaaaacccatttgtagttggagaggcgtacaaaaacaggctatgggctgcatttggcccatgggccgttatttactgatcttagatattggaggaccagtgctgaaaccactggaacttcagctttaacactagcactgtcattttcagaagccgcatcaaactgctggctgcttctgacaaggtggtcagttacacttggtcttctccaccccccatcccccgcccctccgccatttcctgacaaagctgtctctctaacctgtgggtatgtgttctgccgaaaacaagcagccataccacagcagccgtaaccataggactttgaaacaaatgcaatgaatggcatccactagtttcaagtttgaccacatgtttttattgtttgtttgtttgttttttgagttggagtctcgctttgtcgcccaggctggagtgcagtggcgcaatcgctgttcactgcaatcttcccctccctggatcaagtgattctcctgcctcagcctcccaagtagctgggattacaggtgcccaccaccatgcccggctaatttttgtgtttttagtagagacagagtttcaccatgttggccagactagtccggaacgcctgacctcaagtgatctgcccaccttggcctcccaaagtgctgggattacaggcgtgagccaccgcgcctagcctgaccacgtttttgattcttgcttctgttatatctgtattaaccgttcttcttagcttcgtggcagatgtgataagcatgcctttgtgtctttctctaagtcactgacttttcagtaacatctaaatcataaaacataggtctggccaggtgaagtgcttgtgcctgtaatcccaaggggccaaggcgggaggattgctttagtccaggagttggagactagcctgggcaacacagtggacctcatctctacaaaaaaaaaaaaaaaaaaaaaaagtcatgactgctttcctttgttgcagaaaccagtaggtatttgggtgtagaaatgaaaccctcaattatattcataaggctaaaaatgaactattccctacttcctcatttgttttgatttttaaaataaggttctcgttagatattttgagaaacagtttaagattataattttgtatgcagaggagaaaatttagaaaatggtgaagccaacttttttagtgtataaacatttaatcataattatatatgtgtccgtgtggacatttatttaccaaggctttgctttaaggggaagggagaacacagagggccaacatttatggaacattctagtgggccaggcccaatgtgttaatcatctcatttcaattttgcagttatcctccaaggtggatcctattatcttcatttaacagacgtggaaattgaggcttagaggatttgacaaaattacccccatcattaatggcagagctgggtgtaaaccctgggcttggactggcgttatgtctcacggctgtaatcctagcattttgggaggctgaggtgggtggatcacctgaggtcaggagtttgagaccaggctggccaacatcctgaaaccctgtctccactaaaaatacgaaaattagccgtgtgtggtggcaggtgcctgtaatcccagctacttgggaggctgaggcaggagaatcccttgaacctgggaggtggaggttgcagtgagccgagattgcgccgctgctctccagcctgggcgactgagccaggctccatctcaaaacaaacaaacaaaatccctgggctttttggctacaaattccattccaacaacacctttgttttgcataaccaaagagaagttgatgttaattcattgtcaagttatttgtaccgatatactaaatatcctaaaatggggatatgttcctcaattatttactggaatggtaacatttctggagcatatatcttcaaaactgtaatgtaaattaagaatatgaacattctcagtggaaaatgactgttcaagttaacattatttgcatttgccattcttttgtaaagccagaaacgtagatacaattttagattaccttcaagctattataaatcttgagggaaaccttgattgttttttagaaaaatatgtctatctagactgtgtcttgcaaacaggcactttaagatgtcattatatgaatattcagaaactcagatgtaatagaacctagatgagaatgtgtgataatctaaagatatcatttaagtcagggctttaaaaatacatgacttcaagtgaaaaactgagccttgtaaagaagttctttacaattcaccaagcatgctctaaacctgcatccatcctgagttctttaaaagcagacttataaaagggagatgaaagatattttcaaaatatatttttgaagcacaaagtaaaacatatttaatattttaattgtttgaaatgagttgcttaaactagtagctgctgctgggaatgacaaaagcttggctaagattattctatggggaagctggtttatggctttctggagctggtggccaggcatggtgtagattatgggttgcttgtaggattatgtttgttattgcctctttttttaactccctataggagcttttatagtgctttgcacatggtggttgcttcgttgaggatgactaccagtttatggtcatttaaattcagatttagggccaggcaccgtcactcacgcctatgatcccagcactttgggaggccgaggcaggcagatcacctgaggtcaggagttcgaggctagcctggccaacatggtgaaaccctgtgtctactaaaaatacaaaaattagccaggcatgatggcgcacacctgtaatcccagctacttgggaggctgaggcatgagaatcacttgaacccaggagttggaggttgtagtgagccaagatcgtgccactgcattccagcctgggcaacagagtaagactccgtttaaaaaaaaaaaaattcagatttagggacaggcgcagtggctcatgactgtaatcccatctactggggaggctgaggtgggaggatcatttgagcctgggagttcagggctgcagtgagctgtgattgtgccactgtactccagtctgggtgatagagcaagaccctgtctcaaaaaaaaaaaaatcaaatttaattttgtgttgattgtggcttaaaaaacaagaaaaatatattgctgttcaaaaatttttattttttattggatattgcacgggtatgaatcaatttacccataaatctatcgtccgtttaataagtagaatgttacgagtttactcaacattttctttctttctttctttcttttttttttttttgagacagggtctcgctctgtcgcccaggctggagtgtagtgtcgtgatctcagcttactgcaacttctgcctcctgggttcaagcgattctcctgcctcagcctcccgagtagctgggattacaggcatgcaccaccacgctcagctaattttttgtatttttagtagagatggggtttcgccatgttgcccaggctggtcttgaactcctgagctcaggtgatcctcccgccttggcctcccaaagtgctgggattacaagtgtgagccaccatgcctggcccctgttcaacattttctatatgtctcttcctgatcccagaccttctgtacatatgacattatagatgatttagtcttcaataacttgctattttttcctagtaacttttcaaagagatatcattcacatgccacaaaattcattcttttaaacaaatgtacagatccctagtttttagtatattcttaaggttatgcacccatcaccactattcaattctagaatattttcttttccctttttggagaatgggtcttgctatgttgccgggctggagtacagtggcttttcacaggcgcgatcatcacgcactacagccttgaactcctgggctcaaacatttctcctgcctcagcctcctgagtagctggatttcaggtgtgtgtcaccttgcttggccaattctagaatattttcactactcccaaaagaaacctcgtatccattggcggtcactccccatttccctgtttccccaaccactggcagctactaatctatactttctgtccttatggatttgcctattctggacatttcatgtaaatggaatcacacaatgtatggccttcatgtttggcttcttttgcttagcataatgtttaatgaaaggtgtgtgttgcagcatgaagcagtaagtacttcattccttttcatggcttaattatgtatatattatatatagtttttttttttttgagataaagtctcgctctgtctagcaggctggagtccattggtgcgatctcagcccactgcagcatccgcctcccaggttcaagcgatcctcctgcctcagcctcccgagtagctgggattacagatgtgtgccaccatgcccggctaatttttgtatttttagtagaggcagggtttcaccacgttggcaaggttggtctcaagctcctggcctcaggtgatccatccacctcatcctcctaaagtgctgggattacaggtgtgagccaccatgcctggcctcatggcttaataatatttgattgtatggatatacatatatatttcggacatttgggttgtttccagtttttggctattatgaacattcacatacaagcttttatttaaccacttgctttcagttctttgggatatatacctaggggtgggattgctgggtcatgtgtaattttatgtttaggtttttgaggagctgccaaactggtttccacagtgcctgcaccgttttacattcccacctacagtgtacgatggttccaatttctctacatcctggccagcactgtactttctgtctttttggtcctagccattctagtaggtgtgaagtggtatctcattgtgattttgatttgcatttccctaatgactaatcatgttggaaatcttttcatctactggcaatttgtatatcttctttgaataaatttctgttcaaatcctttgtctagttttcagttgggttacatgtcttcttttgttgagttgtaaaacttccttatatgttctcgatgctagaccctcatcaaatatttgatttgcaaatattttcttccattctgtggtttgtcttttcactttttcatagtgacctttaaaacacaaaagttttaaatttaaaaatctaaaataaggccgacgtggtggctcacgcctgtaatcccagcactttggggggctgaggtgggcagatcacctgaggtcaggagtttgagaccagcctgaccaacatggagaaaccccgtctctactaaaaatacaagattagctgggtgcgtgtaatcccagctacttgggaggctgaggcatcaacctgaatcgcttgaacccaggaggcagaggttgcggtgagccgagatcacgccattgcactccagcctgggcaacaagagcgaaactctgtctcggaaaaaaaaaagaaaaacaaaaaaaactaaaataaattatttttttacatcagataggcaatgtgctgatgtcatagtaaggtttgagagcggcacatctcagacatgagtgtgaaaacccaatcgctgtgcttgtgaaccacaaaaggatcataagttttattttattttattttttgagacagagtcttgctctgttgcccaggctggagtgcagtggggcaatctcgattgaacgcaacctccgcctccccagttcaagctattctcctgcctcagcctcccagcagctgggattacaggcatgcaccgccacgcccagctaattttttgtatttttagtagacacagttttaccatgttgcccaggctggcctggaactcctgagctcaggcagtccacccacctcagcctcccaaagtactaggattacaagtgtgagccactgtgcctggcctaggatcaacatttttaaattttgataaagttcaggccaggcatggtgactcgcctgaggtcaggagtttgagaccaaccagcctggccaacatggtgaaaccccgtctctactaaaaatacaaaaattagccaggtgtggtggtgcatgcctgtaatcccagctactctggaggctgaggcatgagaatgacttgaacctgggaggcagaggttgcagtgagccaagatcgtgccactacactccagcctggacgacagagtgagactccgtctcaaaacaaacaaaaaaaaagttttttgatgaagttcagtgtttcccttccctttccctttcccttttcctttccctcccctcctctccctttcactctcatttcctttcctttccttttcctccctccctccttgcttgctttctctttcttccttccttccttccttccttccttccttccttccttccttccttccttcctttctttctttctctctttctttctttctttccttctttttctttctctagtcaaatgcagtagtaagaaagggggaaagaatagaacaagttcaatctgtaactcaatgtgaacaatcaattgagataactcactacgtttggaccagccttctttttttcttttagttccttgtgccttggtttaacatctaagaaaacattcctgaatgcaaggtcacaaagatttatgcctatgttttcttctaagagttttatagtttcagctcttacatttaggtctttggtccatttggagttaatttttgcatatggtgtggggtaggggtccaaattcattcttttttttttttttttttttttttgagacggagtctcgctctgtcgcccaggccggactgcggactgcagtggcgcaatctcggctcactgcaagctccgcttcccgggttcacgccattctcctgcctcagcctcccgagtagctgggactacaggcgcccgccaccgcgcccggctaattttttgtatttttagtagagacggggtttcaccttgttagccaggatggtctcgatctcctgacctcatgatccacccgcctcggcctcccaaagtgctgggattacaggcgtgagccaccgcgcccggccccaaattcattcttattcatatggatatccatttgtcccagcaccatttgttgaaaatacatttttccccattgtattgtctgaatcttgttctttttcactcaacattttgatcctgaaattgctgcatataactacaaatcatttcttttttttttttggtggtggtggcggggcggagtttcactcttgttgcccaggttggagtgcagtggcgtgatcccaactcactgcaacctccacctctttggttcaagcgattctcctgtgtcagcctcccaagtagctgggattacaagtgcacgccaccacgcccagctaattttgtatttttagtagaggtggggtttcatcatgttgtccaggctggtctcaaactcctgacctcaaatgatccactcaccttggcctcccaaagtgctgggattacaggcatgagccactgtgcctggcccacatcattcatttctttatggctaaaaaatagtatcctttgtataaatctgccatgatgtatttatttattctttgttccatacagattgggttgtttccagaagttgctattatgaacactattgctctgaactcacttgaacgtgcgtgcgtgagtttctctccagagtatgtgcctagaagtgtagtgtgtgcatgtgttctccaaagcgattgtcatacttatgcttctatcagcgatgtgtcagaactacgtttcagaaaacagttttaagcattctgtttgttctgtctctcattgaaaaaagtcattactaaaaagaaacaagtggtatttgcaagtgaaatttgccttttaggcctctaatattttattagcaagaattaaataagcaaaaggccaatagcttgagaacgtagtatgcaattagtatctctttgtttgatttattttattttttcacagtgaagacttaagtatctctttacattttaaaatattaatgtggaccttaaacaggtctttggctggttgaggtagtggtttgtttgtttttgagacagggtctcactctgtcacccaggcgggagtgcggtgcagtggcgcaatcacagctcactgcagctgcgacctcccaatcccgagtgatcctcccacctcagcctcctgagtagctgggaccacgggtgtgcactgccatgcccagctaatttttttgatttttttgtagcgatgaagtctcgctatgttgcccaggctggtcttgaactcctgggctcaagcgatcctcccaccttggcctcccaaagcactgagattgcaggggtgagccaccaaccgcacgggcctggtgaaggtttttgctgttagtaggtgagtctgcgtgttaattaaagcaacatcacaccagcctactattgctctcttaactagggtgtggagcaagtataatagagcagttgggctgcgctgggtggctcacacctgtaatcccagcactttgggaggccgaggcgggtggatcacaaggtcaggagttcaagaccagcctggccaagttggtgaaaccccgtctctactaaaaatacacaaattagccgggcgtggtgttgggtgcctgtaatcccagctactcgggaggctgaggcagagaactacttgaactcgggaggcggaggttgcagtgagccgagattgcgccactgcactccagcctgggtgacagagtgagactcccatctcaaaaaaaaaaaaaaaatagagcagtttacagaattgggtatgaatgggaggtgggagtgcttccttttcttggtacccacctattagcatacagtggttatgctaagacagaatcctgcccataatgatgagacacctgccctatttcatgatctcattcaatagtatcatgtgaaagggttgaaggatgcagaattgggccagtagtgctcagaaccttgaaagagttggaaattctctctggagtggggcaaatctacagcttataaagaaagcgagttgtcctggaaagcgcagcacataggtcaccagggatggccagcaggaggtaaagaaagtctcctagaaggtggttgggccggggaggtgagcagcctgcctggtagagaagcatgttggaaagtgctccacctgggagctggggcccagggacagaatgccacttatgaggcatgagtgagggcaggagaaaggaggaagtgacaagatgccccaggcctaggggaacctgtgtcctagtaggtcaccaggccctatgttaaagaaacgggaacctgaagaccagaaggcaacttggtgtcaggaacaaggtaacgttatgattggttatcataactggggcacgagatcagagctagatggacttgctccttattcctcttacagagagtaataatgattttcatcctgggggtacttaataagggctaagcacttatgtatattaatttgtttaatctacacaacaatcctgggaaatagattctgttactgttcctgtgttacaggaactgggaaactgaggcacagagaggggagtggcagagccaggatttgaacccagatactctggctccagagtgcaagctcccttcccatggtactgcacttcttctggaaaaagcatggtttagggagtcaaacaggcttggtttctaatcttcatttcaacctcttactatctttcttttatgaccttaggcaagtcaacgaaattttctgtgacccacagtttccttatttataaaataagaagcatgagattcagatcacacatggaagtgcctcaccccttgcctggccctcggtagggacttagtaaatagccattaatactactcctacaaataaacctttccaaactgagcacaggacttggcctggagcccggggcagggtttaatgtgtgctgaggatggggtaatttatctaggagggatgagaaacatgggggtcaaaattccaagtagatactgacaaaactaggtgctgatggcacaagctccaggagccttggaattagccaagttctccaactcgactggagactaggttaaaatctcaaagacctcatccctcatccctgtaattagcctcttgattgcctgtgaccttaccttaaataagccctgatttaacctaaaagagaagaaatcagaacatgacaagatctgctgtttcatcttcttacatatttctctttcatttatttattttttttgagacggagtttcgctcttgttgtccatgctggagtgcagtggtgtgatctccgctcactgcaacctccacctcccgggttcaagtgattctcctgcctcagcctcccgagaagctgggattacaggcgcccaccaccacgcctggctaatttagtatttttattagaggcggggtttctccatgttgtccaagctgatcttgagctcctgagctcaggtgatcctcccgctttggcctcccaaagtgttgggattacaggcgtgagccaccgcgcccggccttcatatttctctttatacttaacttcctttttccttatctttcccatttgcaagttactttctagttcttatcgatcatttccttattactgttttttcctccttaatgagttggttgctagataataccttcggtgtttttgagaatctgagaatgatggaggagaaatggaaagataggaatagaaagagattacattaggaattaaatttcttgttcctctttttctgatatgaaaccaaattggaggttagatcatccagaaagagaattcagtgttttccagttttccaacctgcttgctcataagaatgacttggagtggtagatcttgattcagtcgttctgaggatagcacaaagaatttgtatttttagcaaacactctccatgattatagtattatatgggaattaaacttaaaccttctttaaataaagcccccaagtttgacccattagctcagctatagaattactgaatatttttagtatggcaatactgtcaagaaaaagcactttataatgtgcttaattttctttctttctttctttctttctttctttttggaaaagtttaaggctatataaaaaatagagagaatggggcttctcgctatgctcagcctgtgtgtcatcattactgtcatgctggccattgttctctgctgctgtgcccgggccctgaggcctccttcacctctatccccaccaccactatccagtcagtttgctgctgcttccgtggttcacatgaggcagatgaggagtttgatgcatgctgggtgacatgcttcaacaagccagagatagatgcctgggaattgcataaagaattgaacacacttgctggctatgacctggttccagaaccccaaatcattgatgttgcttcgcaggcatgcagacagttcgatgcttttcctagggcagtttgcatcctagaggttgttaaggacaaggcaggacctcataagaaaatgtcatccaagaactcagaccaactttaaatgaattgggaatccccactccagaggacctaggcttagacaaagtgtgaaccccagggacaagcgttccagggatttattggtattgctacttgattgtaaacactcccctggaaatgctgatgataacatgttaccttatttgaacacctttttctttattgaataccaaaccatgttatggtaacttggactttaataaaagggaaatgagtttgaactgaaaaaaaaaaaaatagagagaatggtgtgttggactcccatgtaccctcaacccagccttatcagttttcaaaccatggccaagtaagaggcacttttgaaagagaacataggaggagttaccaaacagtaaaggcagaaattaaaagcaactgtgcctgctttgtttagaatacccaaaacctggaaacaatccagatgcccaccaataggtgaatgcatcaaccaattgtggtatatcttttcactggaatactattcagcagtgaaaaggaaatgaactatttatacatacaacatgcaagaagttaaaaataattatgccgaatgaaaaaagccccacccccccatatatactgtatgcatctatgcatataaaattctggaaaactatacatatgtaaaattctaaaggtctgcaacctgcattccaagggccaattccagcccatcacctcttcttgtaaataaggttttattggaacacgggcacactcaaggtattgcctatggatgcttttgtgttacaatggcagagttgagtagtggccatatggtgtgcaaagccaaaaatatttgtcaacccgcaggggttgaaacagacagtaaacaacacaaaataaatacaaacagataggaataatgacaaatcacagtcaatgccatgtcaatagagaatatctggggcaaaggggaaggtccagttgaattgaaatactcatcagtttctgagtgtgttctatagagtttttctgtctctgtgtctttgcacattctctcttttttatttttattttttgagacagggtcttgctctgtcacccaggctatatagtgcagtggtatgatcttggctcactgcaacctctgcctcctgggttcaagcgattctccatctcagcctcctgagtagctggaactacaggtgtgtgccacgaggcctggctaatttttgtattttttgtggagacagggtttcatcatgttcaccaggctggtctcgaactcctgaactcaagccatccaccctcctcagcttctcaaagtgctgggattacaggcatgagctatcatgcctgacctctttgcacattctcttgatctgttatgctgtttgttgccatctactgttgtcaaattctacctacccttcagggtccaactgaaatgccacattaccaggaaaggtttttctcattgtccctgccatacttcatttctcttctgcccttctgtagctcaggaccctctttaggtgtcactcccattagattgtaagtttcctaacaagacgcacgtcatcgtctccaaatcctttgggtcagcacagcctcttttatattaccagtctaagcccctttgtgtgacatttaaagtccgcctggactgactgttcagcctcatcctctgcccttcccttgtgtcctgggctctggccaaatcaaaccaccgttccccaaatgtactatgtagttaacttttaatattgcttctttttattgccttggttctctcaaaaatcagaattaatggaatgttggctattacaattacgtggacatggttatataatggccttggcgatgcccttaataaatgaaatctaaaatgttacattttttttggaacccagaaactcattctaattttattctgcctgaggctttatagcattttctgaagatcatgttgtactcttctttcgtctagatgatttggtcaacagtgataaagttccaacttagacttgataaatatgcaagagtcatgaaatatgaatgaaaacagtgacttttgaaaatcacgcttacctaaaaaaaaaaaaatcctgagtatggtttatatttactatgtgtgtaaaaatgtactgccattcttcattcttctttgttcgttaggttgaagaacaattgtaaaaattgaaggcatggcactaccgccgttatgtatagattaatgtggaaaatagcacgtggcgggtggctaatgactggagtcttacggacccaggtacttactgaaaaattcacttaattttggacataagacttggtcctttttttgtacataaatttaaatctccctttccttgtttacatgtattgctttttttttttttttttttttttttagacagagtctcgctctgttgtccatgctggagtgcagtggtgcaatctcggctcactgcaaccacaacctccacctcccaggttcaagccgttctcctgcttcaacctcctgagtagctgggattataggtgccagccaccacgcttggctaatttttttgtttttagtagagatgggattccaccattttgtccaggctggtctcgaacacctgacctcaaatgatcctcccgcctcagcctcccaaagtgctaggattataagcgtgagccaccgtgtccagcccatgtattgctattttatttacaatggagcattgtatattttacccactgtcagatggcagatgcagcgtatttctgcctgcatcccttggcccccacctcttatcctggttcccaggtgcagggatgctgttgcactggcataggttcctggcatatttgagaagtacaatttttgctgaaccacgttcctcttttatgcaacttggcacctatgtcaccattcaagaacaacttatatcaacaatcagtgcccttaaaaggaaatgctcacaacattcagcattctctctgtctctctttttttctttttttgagatggagtttctctcttgttgcccaggctggagtgcaatggcacaatctcggctcaccgcaacctctgcctcccaggttcaagcaattctcctgcctcagcctcccgagtagctgggattacaggcatgcaccaccatgcccggctaattttgtatttttagtagagacggggtttctccatgttgatcagactggtctcaaaaactcccgacctcaggtgatccgaccgcctcagcctcccaaagtgctgggattacaagtgtgagccaccacgcccggccaacattcagcattctcttaaaaaaaatttttttttgagacatggttttgctcttgtcacccaggctggagtgcagtggcatgatcatagctcactgaagacttgaactcctgggcttgagtgatcctcctgcctcagcctagtagctaggactacagggacatgccaccatgcttggctaattttttacattgttttgtagagacaggtcttgctatgtttgcccaggctggtctcgaactcctggcctcaagcgatcctcctgcctcggcctcccaaagtgctgagattacaggtgtgagcagccacaccaggtccacattcagcaccctcttgattcttgagcccaccatggtgtcagcaaggaaagagaggcagaggtaatttaacctacatataatttcttggttgccagcctccctgagtcttctccattgtccttcagatctgtagtgtttaaaggcctgaattgaatctcttgtattttctgtaaaattctgatattctctgctgtgcatcatatttatatttgcacagctcttaagttatttctcaatcagctgcctcccagtagcacacctttgcagctggcaccattgaaaaggtttccctcagacatgggagctctgactgcttgaagtcaatgggggctgggtgcggtggctcctgtctgtaatcccagcactttgggaggctgaggcaggaggttctcttgagcccaggagtttgagaccagcatggacaacatggtgagaccctgtctctacaaaaaataaaaaaaattagctgggagtggtggcacacatctgtagtcccacctacttgggaggctgagatgggaggatcacttgagcccaggaggtccaggctgcagtggacgtccagccactgtactctagcctgggtgacagagcaagaccctgtctggaagaaaaaaagtcaatggaacaaggcagcgtattgaaatattctttccttgggaaatgtatgtcataaatccttttaccaacagatgatttggatctttaaggctcccaggcacatgactttattctcaggagatggttaggcagtagattaagatctgcttattgccttgagactatataaagctcccaatacctatttttattggagaccaaatttctaacttgttcaattggtctgcttatggcagtgctgctctcccagtcatgggagaagacagttttacatttaaatggaatattctaactttgcttagtaagtaaatactgacccaaagataaacaatgggagaaaatggaatttcagtgtttcatgcaaaaagttcctatcacaagggaatcgcagttttcattctttgggtaggtaggtagatttctccatgttctgtgaaactgtgttgttgcggggaaggaagcaaaagaacaaatcaatagctgaggatgggggcatattaggaatttttttttttctttttgagatggagttttgctctgtcacccaggctggagtgcagtggtatgtcttgtctcggctcactgcaacctccacctcctgggttctagctattctcctgcctcagcctcccgagtagctggaattacaggcccccaccatcacgccaggctaatttttgtatttttagtagggatggggtttcaccatgttggccaggctggtctcgaactcctgacctcaggtgattcacctgcctcggcctcccaaactgccgggattacaggcgtgagccactctgcctggccgtgagccaccccaccgggcctgaattttgcttaatagaatcatgatgaaaatgaatgcgcttgaccagagaaaatggacacttgtgatgacttgggtagtgttcagaaatcactcagcctgtgagaactttgtgcttcttaggtttggcttgatattacaaagctaccactggttacttttatgaaagctccccaggtaaggggcagaggacagcaacctgttggtccagattaacattcagtggtattaagcagagactgtggctttcaactataagtaaaagcatgcttgggggagaaggaggaagggagaaaaaaaaaaatgagaaagcagaaagatgcaacaggggttggcaaagagtcaggagcagggagtgagggggaaagtaggtacatgtggtggagaaatggaagctctcccaatggttccatcagttccaccacactggcacagattctagaagtttcctatttctggagtaggacgcagacatgatgcatttcctactaagacagatttctatccaggaaacatcatttcaagttgcagtgccaggctcgaggatccttctccgtcattgcttcaagtgtggtgggttcagtacctcctttaatgtaagagctggcccgtcttccctacctacttgggacactttctagttttgaccttaagtagggtatcaggaaaattccgagaaagggaagacactctttttcctgaattacagaatagaccaactcattagaaaaaataaattaaagaggccaggcgcagtggctcaagcgtatgatcccagcactttgggaggccgacgcaggcggataacttgaggtcaggagttcgagaccagcttggccaacatggcgaaaccccgtctctactaaaaatacaaaaattagtcgggtatggtggcaagcacctgtaatcctagctactcgggaggctgaggcagaagaattgcttaaacccgggaggtggaagttgcagtgagccgagactgtgccgctgcactccagcctgagtgaggctggagacccagagcaagaccctgtctcaaaaaaaaaaagagagagagagagaaaaccagaacccctttgtttcaaaaccatccacatctgtctatccatccgtaaagcacaaagttatcagagacaaatcatggtctcattttgcttcatgcattttggacctgacatgagtccgtctttgatccctgaggggtggtagaaacaagcaatgcttttcagagtgaagctaaaaaaggcactctgtggaagagaatatattttatagatcagtgattagtgagtcttttcatgacaagttttgtattaattatgatttgaaaacctccagtgcagggttctcaggaattactaagtgcccctgggtacagcaagaagcactggaataaagaatctcaatgtgtgaccaaatttctaaattcttgggggtgtacagaaattagccacttctattttctctctctctttctctctctccttccttccttcctccctcccctccctccctccctcccttccttccttccttcctcttctcttctcttttcttttctttctttttttctttcttgagtctttctctgttgccaggctggagctcggtggcgctatctcggctcactgcaacctccacctccttgggtcaagcgagcctctcactcaccctcctaagcagctgggattacagtcatccaccaccacgcctggctgatttttatatttttagtagagacggggttttgctatgttggccaggctggtcttgaactcctggcctcaagtaaactgcccgcctcagcctcccaaagtgctgggattacaggcgtgagccactgcgcccggcctcacttctgttttctacttgtgtttttatttccattgcatttcctgacttgtgtatattttctcgttgtagaagcacttagtgttttggcactcagacttactttccagtgtttcttctgatcaatcaatagccctttactcatactaactatatgtgatggaagcaaagtcaggaatgtctaatgtgggggcagaattcactatgaagctacttagaatttcaccagccatgaatgatacattatccatcatgttagctagaatatactgggctccagtctcttttgggggatctttagggtccttctgggtgcagaagggaagatgacatttcaggagatctctgcgcattccaccctggcttccttccttccaggtaggctgagagaaagctttcttcttgatggtgctagtgagaacttggcaggtggagcaggaactgttagtttttcactccctgttggagtcattcacacatacagctcatatagaagacggatgtcttttgtcttggtgccaaagacttgaaaacagagaacggtaacttttatttatttatttatttttgagatggtgtttcgctcttgtcacccaggctggagtgcaatggtgtgatctcagctcactgcaacctctgcctcctgggttcaagcgattctcctgcctcagcctcctgagtagctgggattacaggcactcatcaccacgcctggctaatttgtgtatttttactagagatggggttttaccatgttgcccaggctggtcttgaactcctgacctcaggtgatccacctgcctcggcctcccaaagtgctgggattgcaggtgtgagccactgtaccaggctagaatggtaacttttgaaacccatttttgttattctaaagtcttcacggtgtggtgttgggaaggctgggttgctgtgtcagatgggtaccctcaccccagttatggctgttctcacatccaattccaggaagcctcattcttgtgtggtcatagaaaagcaaccttaattttcctgtgtcttagtttccttacctcctagaaatgtggcaaagatgcagaatctgtttatttagtaaatatttatcaagttctgggaatacagcggcgaataagccaccaaatccttccttgatgggactcaccctctaacacagccaaggcaatgagagaccttccaggaataacattgagaggcaaattatgcatgtaggtgacacatgaggccaacaggaaatgacctcgaattgaagttgaaatttacagtgcgagatgagccaagaatctgtgaacccttagaactcaggcaaggtgagctggtgtgacttgcaggaagtatgactcaattgtgactgtacccaagaaggcttaaaccacatcatctgaaagaaggatgtgccaacatacgcttccaatgactaaaaggaggggcagagggaaaaacaaaacagcatgttcccaggcccatcctaggaggaaggaaggctattaatacattcctttgacattgtctacttaccattgcatagagttggaggtgagtggcatatggagagacagagatttggagacagactgagtttgaatcccaattttgtcttattaggccgtggacaagtcatttcaactctctaagcttcaatttcctcattatttattttttaaaatagagatgaggtcttgctatgttgcctaggctggtcttgagctcctgggctcaagccatcctcttgccttggcctcctgagtacatacaggtgtgagccaccacacccacctgcccagccctagcttgctcactgtctttctttttttcttttttttgagacagagtcttgctctgtcacccaggctggagcacggtggtgtgatctcggctcactgcaacctctacctcccaggttcaagagattctcctgcctcagcctcctgcgtagctgggattagactactacactcggctaatttttgtatttttagtagggatgggtttcaccatgttggccaggctggtctcgaactcctgacctcacgtgatctgcccacctcagcctcccaaagtgctgggaataaaagtcgtgagctaccacgccggtctagcttactcaaacaatgtctagtttgcagggtagtgtatgtacgtgcctcagtgtctttggtgtgatatacacttagtaaatgttagttcagctctaacagactcatctgagattttgattctgtaactcccaagagttcagtatgctagcatttttttttttttaacatgaggaagagttgggtaaggaagagctgtgttttaattgcattacggctcaactgctaactgttttgatatgttgaacaaagtccattgattcttcatggaggagtgcttgctggggagtgtgagtcagcacgtctgcgttattaacttgttcggaagctttttgtggcagattgattttaaaagcccccaaggaaacagaggattttatttaatagaaatattgtcagaatgacattgagatttgggtttagctttcaaatcactggatacaagttgaatcaggtcttttctctgacagatattggaaacatggtgtgttggagaaatactctccattgcctggcagggcccttaccttgggagagggggatgatatttgcctggagcaccccggtgaccccacctagcaggcctgactttctaaaggcaaggatgtgggcttggtacagagaggtggcgaaacctgaatattagtattttcaaatctgattactagtattttcaaccgacctgactaggcgcaaatccatgctcatttaaatgaaagtctacctgaaatcatgcctcactgcaaccatgcacttctgggcttaagcgatcctcctgcctcagcctccctgaaggtccacctgcatttgaataaggatggatgtgcgcccaggtatgtctttgtgggtttccatcctatagttctggagcaaaggacaaatggaagaaagttgctaaagaaaagaagagcgtttctgtggctccttcaagagcagttacagatttctgtcctgaagccaggagggaatatgtggcccaggtcccacagtggagagttgcaatgctccctcttgggcatctctgtcctcatttggattcagggctgaaacttcgggatcagtttcacagaagaggtttcaagtagatttcttgcagtcctgaaagtcacacttctctgaaattggtttaacaccaatccaaaacctattggtgttcctgttacattttacaactcttcatatgccacttaagaaatgacctctctagaattgtgactccagcctaggcaacagtgggagactgtctcaaaaaaaaaaaaaaaaaaaaaatagagttgaggatgaggagctcaagaataaaagtgagatgggatggacagagaaaaagcaggaaaactagcgaatggtatggtagaagccaatagagaaaggactttcaaggtggagggagagaatttaagagttgggacttctcttccagcaagaagaggaagaatggcataagagggactgtgatgtaggcactatgtcaccatcgtatttaatccaaactataactatgcaagattaccacttgaccttcaagaaaactgggctggctgggcgcagtggctcactcctgtaatcccagcactttgggatgccgaggcaggaagataacctgaggccaggagttcgagaccagcctggccaacatggtgaaaccttgtctcttctaaaaattcaagaattagctgggcgtggtggtgggcgcctgtaatcccagctactcaggaggctgaggcagaggaatcgcctgaacctgggaggcgaaggttgcagtgatccgggatcgcactactgtgctcctgcttgggcgacagaggaagactccgtctcacaaaaacaaacaaacaagcaaatatacaaaactgagctgaggagacaattcgacaattcatgcagtcaataagtaggttgcagaggttggagtacagtggcgtgatcggctcgctgcaacctccgcctcctaggttcaggcgattctcttgcctcagtgtcaggcctctcagcccaagctaagcatgtgaccttcgtgtatacatccagatggcctgaagcaactgaagatccacaaaagaagtgaaaatagccttaactgatgacattccatcattgtgatttgtttctgccccaccctaactgatcaatgtactttgtaatcttccccacccttaagaagtttctttataattctccccacccttaagaatgtactttgtgagatccaccccctgcctgcaaaacattcctccaaattccaccgcctatcccaaaacctgtaagaactaatgataatccaccacacttcgctgactcttttcggactcagcccgcctgcacccaggtgaaataaacagccatgttgtgcgcgcgcacgcacacgcacacacacacacacacacacacacacacacacacacacacacacacacacacacacacagagggagagagagagagaaatgacctctctagagaaagaagaatcaccatggtatgggagaatgaacccctcagaaatggtcacagcttattcaagtcctaaacccttgctatgggcaagggttgacaaactttttttttcttttctttcttcttcctgtcttctttcttttcctctctctttctctcactctttctctcccttcccctccctccctccctccttccttccttctctctcattcgctatttcttttctttctttcttttttttttagagacagggtcttgctctgtcacccgggctggagtgcagtggcgcaatcatgcctcattgcaactttgcactcctgggctcaagcgatcttcctgcctccacctcccaagtagctgggaccagaggcacacaccaccacgcttggctaattaaaaaaaaattttttttttaaagagatggggtctcactgtgttgcccaggctggtctcaaactcctagccttacgtgatcctttcacctcagcctcccagagtgctgggattacaggtgcaagccaccatgccaggcagcaaagtttttcttaaaaggccagaaagtaaatatttttgcctttgccgatcataaggtctatgtcacaaccactcaactctgccattgtagctcaaaagcaaccatagacaatagggtcaaggagtgagtgtgactgtgtttcaataaaactttatttaacacataggcctccctcctgcaatcccttttgctgatcacttcatagaccatcatacacttcctgtgctctttggagcttgaaaatcatactttggagtaagaaattcttttgaatataaattacatatgtttggctgtggagaaataggaatgcttttacactgttggtgggaaggtaaattcgttccaccattgtggaagacagtatggggattcctcaagactctagaaccagaaataccatttgacccagcaatcccattactgggtatatgccctaagaaatataaatcattctactataaagacacatgcacatgtatgtttattgtggcacgatttacaagagcaaacacatggaatcaacccaaatgcccatcaacgatagactggataaagaaaatgtggtacatatacaccatggaatactatacagccataaaaaggaatgagatcatgtcctttgcaggaacatggatgaagctggaagccatcatcctcaacaaactaacagaggaacagaaaaccaaacaccacgtgttctcactcataagtgggagttgaacaatgagaacacatggacacagggaggggaacaacacacaccggggcctgttggagggtggggggcgaggggagggatttagaggatggatcaataggtgcagcaaaccaccatggcacacatatacctatgtaacaaaactgctcattctgcacatgtatcccagaacttaaaataaaaataaaaaataaattacatatgtttagagaaaggaagcttccatatttatgtatcatcatgatttttttaaaaacttatttaatttgcatacaaatttgttccacatttgtttcctgtaaaatggattcctcataaatgcttggtaagagtatccatgtttgatgtgaaacaaactgatgatgcttgaattcctgtttactctgaagttcttttcacatgctggtgagttctgagcaccatgcttacatgcacctctcctttgcagcaaacataagttttgaggtccctgtgagtcctaatggcaccgaggtgctgtctcaggtgaccttctcctaatcctgaaaaagtctccatgattggccctggaggagttctcctggttgtctggaatgagttcatactaatagtcagggctctgggcattgtgagaccctggctactttctttctttcccacaatgtatactttctcactatttatttatttatttttttgagacagagtctcgctctgctgcccaggctggagtgcagtggtgtgatcttggctcactgcaacctccacctcccaggttcaagcaattctcctgcttcagcctcccgagtagctgggaccacaggcgcccgcaaccacgcccggctaattttttttgtatttttagtagagatggggtttcactgtgttagccaggatggtcttgatctcctgaccttgtgatcctcctgcctcggcctcccaaagtgttggtattacaggcatgagccactgcacccagccatgctttctcactatgaaaacctcctcggactcctcggactcctcacaagagtgagtgagctggatttgctgtattttcaaagtcatccttcattacacatgaacattggctgcacccgagcttggctgtgaactgattattctcaccagggcctgttaacacaaattccatcactcctacagctaaaaataaaccatatttaacaagtagaaacaaaactccaggcaaatacatcatctgatttgatggaatctttgttgaaaatgttaatggtggaatcagatgcttacctttaagatgggagattgcattccttcgtgagcaaggtgcctagaaatcaattccaactcttgatatgatcagagagattgatggatacctaagtgtctgaaatgataatagttcatcttgtctaagggcattcccccatttgtggcacattgtccttgacgatcagtcttctatttattttattattttattttttacagatggggttctcgatgtgttgcccacgctagagtgcagtgactgttcacaggcaacatcattgcacactgcaggcttgaactcctgggctcaagcaatcctcctgcctcagcttcttgagtggctggcactacaggcatccaccactgtgccaggctcagtcttctatttaaataatgctgctactttagagggtttaggaatatttagtgtttacagctagtgtctctgtaatatgaaaacatactgtgccttggctgggtgtggtggctcatgtctgtaatcccaggaatttgggaggccgaggtgagaggatcacttgagcccaggagttcgagaccaacttgggcaacataatgcccatctttttaaaaaataaaaaacaaaaattagcagggcatcatggtgcacacctatagtcctagctaatcgagaggctaaggtgggaggattccttgagcccaggaggatgaggctgcagaaatcgcactactgcacttcagcctgggcaacagagtgagaccctatctcaaaaagaaaaaaaaaaaaaagaaagaaagaaaacatactgcgcctagcaatacaaatagtgacctgcgggtaatgagattatagatgattttaaacattcttcttgataattttcctgtgttttacaaatatttaataatgaatatgtactactctaagaaaaacagtacaaaggttttcaaagttttttgacagtcatttacctgcagtaagtacgttatacatcccaaccccatataaactagcatttatgtatttataaacttaaaacaaacattagttaaccatttttttctacttgtcttgctttttttttttttttttttgagacggagtctcgctctgtcacccaggctaaagtgcagtggtgtgatctcggctcactgcaacctctgcctcccgggttcaagcgattctcctgcctcagcctcccgagtagctgggattacaggcatagtgccaccacgcctggctaattttgtatttttagtagagacggggtttctccatgttggtcaggctggtctcgaactcccgacctcaggtgatccacctgccttggcctcccaaagtgctgggattacaggcatgagccaccacgcccggcttttttacctacttgtctttacctcctgatgttttctgtttttctattctattttatcaaagaaggaagaaagaaaaaaagaaagaagaatattcatgtattgaccaggtaaaatgatttcatgaaccactgatgggtaaattgaaagctagtgattataggacagtggttgccagtcttgtatttcatgggtcagtaaaatttaaaagaaattttggggattgatgtaagatcatctgtttttcatgttgcaaagtaaggatgttttaaaacaaggtagctgggcgcagtggctcatacccgtaaccccagcactttgggaggccaaggcaggtggatcatctgaggtcaggaattgagaccaacctggccatcatggtgaaaccccatctctactaaaattacaaaattagctgggcgtggtggcgattgcctataatcgtagctactcaggaggctgaggcaggagaatcacttgaacctgggaggcggaggttgcagtgagctgagatcgtgccactgcactccagcctggatgaaagagcaaaactctgtttcaaaaaaaaaaaaacttacaaagtaattatttctaccaccattattcttttattcatttgtcatttaaaatcttgtttttatgaattttatgatttgagagaattttcatgtcaaaatatcctttcttttctgaaagaatattttagcattaaatattagaaggaatacaatttcagtagttatgtgatgaataaatttagctttctgaaaacagaccgcacttgctttgttttttccatttggcaatgaacctgtgcactagcatttaggaatcatttaggaattatcagtgtagtggaaacagccttgctttgaaacaacacaattttacttccagttctgaatcatttaatttttctgaacttctttttacccatctgcaaaagaggaatctcagaggtatagcaataaggtttataaagggtttaagacagttctgaatgcgcaggagtttatagatggtaacgtcttttctctggatcattaattctccttactactctgtgattttaaaaacttagaatgttggctagtgtggtggctcatgccagtaatcccagcactttgggaggctgaggtgggagggtcacttgaggtcaggagttcaagaccagcctggccaacgtggtgaatccctgtctctactaagacacaaaaaaattagtctataatcccagctacttgggaggctgaggcaggaggatcgcttgaactcgggaggtggaggttgcagtgagctgagatcatgccactgcactcgagcctctgtgacagaacaagactctgtctcaaaaacaaaaacaaaaacaaacttagaatgttggccagtgtggtggctcatgcctataatcccagtgctctaggaggcagaatgctctagagggtggaagcgggaggattgcttgaggtcaggagtttgaaaccagcctaggcaaggtagtgagacctctgtctctaaacaacaacaacaaaacagctgggcgtggtggtgcacacctgtcgtcccagctacttgggaggctgaggtgggaggatcagttgaggccgggagttcaagatcagcctgggcaacatagtgagaccctgtctctaccaaaaaaaaaaaaattagacatatgcagtggcatgtgtctgtagtcccagctgctcaggaggctgaggtgggaggatcccttgggcccaggaaggttgcagtgagaaatgatcacaccactgcactccagcctgtgtgacaaagcaagaccccatctcttaaaaacaaaaccaaaccacacaacaacttggaatgttgaaagaagttcattatgtgtttccattttatgatgaactatttctttaatttttactctttttagttactgtttcttttttttttttttgcgatggaatattgctctgtcgcccaggccggagtgcagtggcgtgatcttggctcactgcaagctccacctcccgggttcaagcgattctcatgcttcagcctcccgagtagctgggactataggcgcccaccaccacacccagctaatttttgtatttttagtagagacgggatttcaccatgttgaccaggctggtctcaaactcctgaccttaagtgatccatccgcctcagcatcccaaagtgctgggattacagagtgagccaccgcacctggcctcatgtcttgtcttacctacggctttccccctctttctgcgttttctccaccctttaccgctgagtcagcctctgtataccattattcatgatgggaactcagcttgtctgacagttggttttaaggcacaattagaaaatattccttgatagtacaatgagtttgcagtttttaagttgtggttttggccagagatattaataagggtttggacgttgagtggaatactaagaataagaaaggggatgtgcttaaaatacatctcatgtgccttctgtttaattacacggtaatttgtaaaagagactggtttctgtggccttgaatactaatatagactttccctcaccacagcttatcttcgagtcataaacacagaggcatgcatagttcacacatctccatgtattttctgtttccaaggaagatatgatcactctgaagaaccaaaagatgagtcactctgaaaacttttcttcctttgtcttaatgtcatgactgtcttaacaattgactgtgtttatttcagcaacatttatctttagtctcttctctttggctcagtcagatgttttcagtttcacccagcacggaccacagccatattacctcctatatcccagtggataacttctgcaggaaaacttcagctacttgacactcttgggaaacgagctgggtgttcctgataagaaaggtttaccagaatcttgtaaagatggtttctctaataatagctaacatatttataagcgtgctatgttttagaacatgggtgtccaaacttttggcttccttgggccacattggaagaattgtcttggaccacatataaaatacactaacactggccgggtgcggtggctcacgcctgtaatcccagcactttgggaggccaaggcaggtggatcacgaggtcaggagatggagaccatcctggctaacacggtgaaaccccgtctctactaaaaatacaaaaattagccgggcgtggtggtgggcacctgtagtcccagctactcgggaggctgaggcaggagaatggcgtgaacctgggaggtggagcttgcagtgagccgagcttgcagtgagccgagattgcaccactgcactccagcatgagcgagagagtgagactccgtctcaaaataaataaatacataaataaataataaaataaaataaaactaatgataactgatgagctaaaataaataaataaaggtccgtgtataatttttgtgatatctgccaccacagataagccaaaaagtcctcttattcaaagggttggacatggctgtttcagtaacttcattacaggctttgtgaacattatctcatgtaatcctaaaacaaaacaaaacagaacaaaatgactttccctgtctcgatttcctgagtgatctttgtaaacatcagctattacagtgtgctcttttgtgtagatttcaggtgtatgtgactcttgtaagcattcagcttaccactgtttattgagtgattattatgtgccagatacagctctggacacaggtgtgactaaaacaaactccctgccctcaaggtgcttatattctggaggtgggaggaggaccctgacaacagcatggaaatatacaaatataatataatgtcaggtagccacaaatatagcaggatatagggacagcgagtgggggtggggagagtggtggcggaagacccttgaggaggcgacagttgagcagagacctggatgaatcgtgggagcaaggcttgtagatatttggcaaaagagccatttgattgtgacttacgtggttctccctcttctgctttctatagttttcctgtctcctggcagtcagtgccaggaaagaatttagttgggccagaccaagggaagccagacctagaaaggaggcaaagctacaggtgcagagcagagattgctaaggtcttagccgcgggctgcgggagcgagcctgggcgggcgggtaaggctgtggaaccggagtctggagagtctgctggctgcgcacaaacacggctgtgcttctgggcagatgaatggagggcaagccagccccgggcagaagatagaacagagaggaagctggggagccgggtgcagtaactcgaaatcccagcactttaggaggccgaggagggcggatcccttgaggctaggaattccagagcagcctgggcaacatagggagagtctgggtgtggtggcctgcgcctgtaaacccagctactcgggaggctgaggcagaaggatcgcttgagcataggagtttgaggctgcagtgagctatgattgtgccactgtgctacagcctggatagtagagtgagactccatctctaaaaaatagaaataagaaaaagaggaagccaggtgcaggctcaggaggctgacgcaggaggatcacttgaacccaggaggctgacgcaggaggatcactggaacccagcagtctgagactagcgtgcaaggatcacccctgtgaatagccactgcactctagcctgggtgacatagcgagactctgtctcctcctccccataataataataataataataaagaggaatctggtgctggcatagaggtacaggctggatgggagggtggtcaggatggggcaaggggccgagaccacaaatggtcctgctcctggggcttagaacgggacctggttctccagggaggtgaagaggagcaaggccagagctcagcagcagaagctgtggtttaagagagaggcttgattatagatgttaggaagtcaagagcccagtgcctagaacctgggctgcagacggggaatgaggcttatggctccgtaatggtgatgtaatgctgacacctcagctgtggcaccacagagtcctgtgttacccctccctgtgcccacacaagattaccagaaactactttgcatcccattgaatgcaatctgctctgtgcctcttttgtaaaatctgcccatttacacatggtgttgccaccccagcctgggaactgagcagcaagaggaagcctcccacccgccccactcccaagtagcgtttccttttccggctcccacaggcccattacataacctttcttagggccctctgcacagagctgtaatctttggtagaggggcaggctgtgctttagaagcccggagctcaggctgggcgcggtggctcacacctgtaatcccagcactttgggaggccgaggcaggtggatctcttgaggccaggagttcaagaccagcctggccaacatggcaaaaccccgtctgtactaaaaatacaaaaaaatttgccaggtgtggtggtgcatgcctgtgatcccagctactcaggaggctgaggtgggaggattgcttgagcccaggaggtggaggttgcagtgagctgttgcaacagggaacaacagagtgagactctgcctcaaaaaaaaaaaaaaaataaaaaaataaaaggccaggctaggtggctcacgcctgtaatcccaacactttgggaggctgaggtgggtggatcgcctgaggtcaggagttcgagaccagcctggccaacatggagaaaccccgtctatactaaaaatacaaaaattagctgggcatggtggcgggcacctgtagtcccagctactcaggaggctgaggcaggagaatgacgtgaacccgggagatggagcttgcagtgagctgagatcacgccactgcactccagcctgggtgacagagcgagactccatctcaaaaaaaaaaaaaaaaaaaaaagaagcccagagctcaagatctggtcagactccctggtttgaaccttggctcctcttgggcaaattacgcaacctcagttacttcatctgtaaaacggaaattataatagtacttacctctgcaggattcttgtgaagataaaagccacagaacagtggctgggccccagaagtgttagtgcttttgacgtttctgtaaccttcactaaacgtgacaccctccggggccattgtaggcatttttgtaccctcagtgtctaacatgttacccagcaggcacatggattcattcaacaagtatttattgaatgccttcttccaggccctgggatgcagggacatagccaccaatgagacaaactcctgcccccatggggctgacattgtgctgggggagacagactgtaagcaagtgaacaaggacacaaataatacagtttcaggccaggtgcggtggcctacacctgtaatctcagcactttggtaggccaaggtgggcagatcacgaggtcaggagttcgagatcagcttgaccaacatggtgaaaccccatctctactaaaaataccaaaattaggcaggtgtggtggtgcacatctgtaatcccagctactcaggaggctgaggcaggagaatcgcttgaacctgggaggaggaggttgcagtgggccgagatcatgccactgtactccagcctggacaacagagcgggactttgtctaccaccgcaccctccccgccaagaagaacaatttcagctagtgataagtggtataaaaaaataagttggggtcctgtaatcgagtgacctaagatgtgtgagatacatggttggtggtttttttgtttgttcctttgttttactttttatttttttgagatacaatcttgctgctctgttgccccaggctgcagtgttgtggtgtgatcatagctcactgcagcctccaattcctgggctcaagggatcctcctgcttcagcctcccaagtagctgggactacagatgtgtgccaccacacccagccacccagctaatttttaaattttttgtagagacagggtctcactttcttgcccaggctggtcttaaattcctggcctcaaaggatcctcctgcctcagctgcctcccagagtgttgggattacaggcctgagccaccgtgtctggctgggggtgctattttaaaaagaatggacagaaaatttctgcgaggatttgacgtttgaacaatggtcttatctaagcgacaatctgagagacagctgtccagacacagggagcagcaagtactagcatggcctctttgtgtttgagccaggagaggaataaaggtgagggtgagggaggcaagaggtaagcagaaggtagggaggccagggaggggaaggagggtgatggaacgaacgtaccggacagggcgtggaaagcgttcggggcctggctgggagtttgggatatgtcctttttgcaatgggagccactgagagttctaaaaccagaagtgacataatctgattcatgtttcttggctgtgtgcagagctttgcaagaatggcaacagggataaaagtcctgagaccagggaaaacccaagggtcttggatttgtgtggatggctgaggtaaaggagactcattccatggccttttctggaaagctgggtcatctgttaccagttttattgattgtcttctgtagcaggttgaatagtgtcccctcaaaatctgtgtctgcctggaacctcagaatctgattgtatttgaaaataggggtgttttttttttttttttttttttttttttgagacaggatctcactctgcttgcccaggctggagtacagtggtgcgatcacagttcactgcagccttgacttcccaggctcaggtgatcctcccacctcagcctcccgagtaactaagactacaggcttgcaccaccatggctggctaatttttgcatttttagtggagacagggtttcgccatgttgcccagactggtctcaaactcctagactcaagtaatccacctgcctcggcctcctaaagtgctgggattacaggtgtgagccactgcacctagccggcagtagggtttttgcagatgtaattagtgaagggcctcaagatgaaataatcccgaaattagagtgggacctgtatccaatgactgatgtccttataggaaggggagcggacatagagagacacagggagaagatagccccttgaacatggaggcagaagttggggtgttgcagccacgagccagggaacgcctggggccaccagaagctggaagaggcaaggacagatttcctccagagcatggccctgctgataccttgattttgggcttctaccctgcagaactgcgggagaacacatttctgttgctttaggcacttggtgatactgtgtttctgcagccctaggaaactaatgcacctcctaagcatcactggtttcttaggaatatttgcattggggtgcaggcatgagagaggcctcatcaggaagactggccattctatagaccttccttaagccctggagaggtgggtggtcttaccaggaactcaaaggagctctaagatcccagaggaggtccctgagaacgaatgaacaaatgaatgaatgaaagggcccaaggccgagtgcggaggctcgggcctgtaatcccagcactttgggaggccgaggcgggcggatcacttgaggtcaggagttggagaccagcctggctagcatggcgaaaccccatctctactaaaaattacaaaatttagctgggcgtggtggcacacatctgtaatcccagctgctggggaggccaaggcagagaattgcctgaacctgggaggcggaggttgcagtgagcggagatctcgacactgcactccatcctgggcggcagagcgagactctgtctcaaaaaaagaaaaaaagaaaaaaaaagaagagaaaagaaaaaagaaaaacaaagatcctaagacagggctgtgtctgaccttcaggtcactcaatagccctagccatgaacgttgtaattgaccctctgcagcacatagacctctagtcagtgcagccaccatcattccgctgtgtgccttctaagctgttctgggttgtaagatctttgttagaatttggataaagagaacagagttctaagtgactttttttttttttttttttctgagacagagtctcgctctatcgcccaggctggagtgcagtggtgtgatctccgctactgcaacctctgcctcctgggttcaagagattctcctgcctcagcctccccagtagctgggattacaggcacctgtcaccatgcctggctaatttttgtatttttagtacagacagggtttcaccatgttggccaagctggtcttgaactcctggcctcaagtaatctgcctgcctcggcctcctaaagtgttgggattacaggcgtgagccaccgtgcccagctgggcctaagtgactttctaatgcacagaatgtgtgaattttagaatatgatcttttaccatccagttttctggactcagaagtaacttttccttcctctcttttaaatgttcattaggtcaaattagaactgaagaagcaaccctgaggtataatactctgccccagcaacaaaaagcagtactgctgctgacttacggctactattctgagttgaaagtgctgaaaagaaaactccaggccatgcgcatttaatttgattgtaatcctgccagagatccacctgctttgctcccatccgtttcccttggcctgtcctgtagaaagggactgcaattgagcacttttttaaattaaaaaaatgacctgcactctccacaaaatacaggtccaaatggcagtagcttattggtcatcagtttctcctaggaaacctgggccacaagtttctggttggtttcggacacacagtaggtgctgaattaattaaaggtgtttctttaattcagcccagaagcatctgatttgcttaggaaattgattaggcatatattacctggatgatgtcaatttctatgtaaccatttctctcctgtgtaattgatgagcctcctaatgttgattttattttattttaccaagcactgtatttagttaataaaaaatacagaataggattcaaaacagctgtgtttgctattggcatggccgtcaccctcctaatacctgtgcatgtcataatagactacatttgcagaaacaaaaggttaggaataaaaagatgacttttgtccctccagctgccagtgacaacccacagcctcagcttatggtatttatttaatcttgtatctgtgatagggctctgagacacttctgtgaagcagatgtttgaagatctgacaattatggaagaaaatttctcatagaaaaagatatgttctccagccttgggcgggggcctgacattactcttccacatttcactcattcatttattgaaaaatgaaaaattatatatatttataatataccaggtgatattttgatatgtgaatacattgttgaattattatgttaagctaattaacatatctctcaccttacatacttattttttgttgatgagatggacatttcttttttaagtatgcttaaatgtgttcacggattgtgtgaaatttttggcatcccgtttcttgatataccaccttttgccacatttcttgtttatatagtatgtatctcagccggtgatgaatcaaggaaaaagataaagaaaaacaaacaaacaaacaaaaaagcaaacaaacaagttaaaacaaacccaaaaccttctttcccagtaggcagtaatttgggatgtaaaatgtatgaggtaggcaggaggaagatgaaaagtctgtctgaaatgagaactgtctgttggcttaattcaggtgatcacagattgtctgtagccttgagcaaagcctagagaatagtgaggctagtaaaacactagcccttgggctcaaaatttaagatggcaccaaaaaactaaaaatcagggtaaataatattttgatgcaatatttttaaaaaataaaaattaatgcacaatactctacaatgaacaaaatatcaaaatgctaaagacaggctctaaccccgcactggcaaacgcaacctcacttgtctccttctaatcctggccttgacccctaataacaaaaagtaagatcatctagacctcaaaaggaaaagttgctagtccctctaagccttcgtttgctctgggtttgaatccaaactctgttatgaccaacttagtgaaatcaggcaaattactcaacctctgtaacttccttttgaaaaatggagatgttttctcttgcaagactttttatttatttatttatttatttatttatttatttatttatttatttatttgagacagggtctcactccattgcccaggctggagtgcagtggtgccatcatggctcactgcagtctctacctctccaagcttgggtaatcctcccaccttagtctcccaagtagctgggactacaggcatgcaccgtcatgcctggctgattttttttttgaaaaaaaattttttttatagggataggggtcttgccatgttacccaggctggtctcttaactcctgggctcaagaaatctgcccacctcagcctcccaaagtgctaggattacagacgtgagccatcacgcctaacctcttgcaggacttttggggtggtttaaaaattacgcctgtgtagcactgggaacattatgacacccaataaataccaaataaacaacagctttaaatattataattcataatgattcacagagtattaagatccccaggcgatgcaaccaggtagtacctaagtgtatcagtcttgggtgcatctgtcagggttaacctggctttgtttttaactttacaggacatatcagagtatagctattgtgcctgtgctttgaacactcaaacatccgctcaactgctaagtaactgatttcctgtttagtcacagctccttgtctgggaccagccactggcagcaaattgtcatcttctgtatctccctctcaaagcaactcagccttctgaagacgtgtagaagttaggtctcgcaggcttgtatttattaagcccccccccgccacccatcagtccccagttattttgagtgtctcaaacgcatttcccacacctgatgattcatctgaggacgactcacccttgttgtcactgacactgtccacagcccagagctcagcctctgatttgctcggcagagatggggctatgtacatatcgtgtgagacggaagctaacataagcagaggagaaatcacggaagcaaagtgaagtgggaatccagttaatacttggaacagaaaactggaaagcagctcattcattctctccgattgtaaaaggcggatggaaacaacacttttgtcagcctttcttctaatccgatcacagctgtaaagaccataaagccaagccccgacgtcaattattcttctccctgttcctaagaatgtgaaattagatggggaaaagtgacagaagagtgtcactaaaataacttattacactttgagggtcttagtcgtcattaatagttgttactttttgaatattcatcagtgcgccctgctgttcggcaagagaggctgtatgaagtaggaactgcacacgcctggcttcagtcatgtatgccttggatttaagctcttcttttccacttaattagttaacaggaacttactgagctgggtgcaaaatgatacagaagaataggagaatgggattgtaacccctgaagcgtttgtgatttagttgagtagaataaactctgctgagcccaagctgagcctcagcctcatgcacctgctgtatttccacattctttcatttctgccccagaaatgttgcttgaatctggtttctcctctttaaccatctaaacttttactattgctttaggactgcctctcctcatttattgctatgttgattgcactgccctgccaaaccatattggagctggatcaggggaaaataagcatatatatatatatatatatatatatatatatatatatatatatgcatgaaaatatcctcccatattgtggaccaagtggaaaagttaatgaagctctacaatgaaaaaaaaagttgactatgagtaaagtctcatgttgtccaatctgtaatcctattattgtcaaccctcgtaagcccgcccagtggatgaggtggtgggagatgacgagggtgggatgggcattctgcagccagtggggaagaaggcagggccctaaaacaaacaagaacaagcatatctttatttagaatttggatgtattttcatcgtgaatttcctttgcattcattttgattaaaaaaaaatgcattatggctgggcgtggtggctcacgcctgtaatcccagcatattgggaggctgaggcaagtggatcacttgagcccaggagtttgagaccagcctggccaacgtggcaaaaccctgtctctaccaaaaatacaaaaatatatatatatattagctaggcatggtggtgtgcacctgtagtcccagctactttggaggatgaggcaggagaattgcttgaaccaggagacgaagggttgcagtgagctgggattgcatcactgcactacagcctgggcaacagagcaagactctgtcccagaaaaactaaaaaaaatgcattaaaataatatttatctgtattgctgaggtttgaggcaccctcttaaattttacacctaggcaatacctccagctctcacactaatccaggctctggtctattacaaaagtccccgcgggctctgacctacacagctgccagttaccttcctaacagacgaccagtgatcatgtcactttcttgttaatccagactgctgggagcgaaaattcagccccctcggtttggcgttgaagcccctttacaatctggcccccacctaacccaccagggcgcctgccctgtctggccctgttcccacctctcttgcctcatcaaacttctgccagactgcacctttgtccatgctctgctgtctgcctgaattgtgcccctgtctcctgaattgtgtctccaagccccttcacctaaaatattcctgttagctctcaagtttcacctcagatatccctgactggctgggcagacttcttagactctcgcaagcaggcttctttgttctgttttcccataggaaattgttcgtttccactcaattcatatcttggtggttgcattcatttttcgactgtgatttatctgtttaccggtgtccctagttccactgccagctccttgaggcgagcaaccggggcttttcatgtctaatgaataaatgaatacaatttgacacagtgaaaaaggcaggaacagcaaccataaaaaatccatgaaaaacaaaagcacagaggacaataggcagagaggacactggtcttttttttttttttttttgagggggaattctcactcttttgaccaggctggagtgaagtggtgtgatcttggctcactgcaacctctgcccccagggttcaagcgattctcctgcctcagcctcctgagtagttggaattacaggcgtctgccaccacgcctggctaatttttgtatttctagtagagacggggttttgccatgttggccaggctggtctcgaactcctgacctcaggtgatctgcctgcctcagcctcccaaagtgctgggattacaggcgtgagtcactgcgcccggccgacactggtcttaaaatcaggagaacctggatttggcttttggtcttgtcattagccagctttacaactctgtcattattttcagattttttactatggaaactttaaaattgtagcaaaaatagaacagcctgatgaacccacatgtacccatcatccaactagaacaatgtgggttcatcaggtttcttgtcatactgccccgctctgctacccccatccctggattgtttggaagcaaatcctagaccttactgtcacttcacatataattattaaaggaagaacatgaacattgtaattgattgcaaactcaccatgaacctggtggaaagaagagatcacaataggccgagatcacggggaagctcttggaagcaagttatgaaggaggaatacggattttggcagagaaagtctgtaagtaggaagctgtaaatcatgtgtccaacatgtggtgagcagattgttttatctggagtggggactgggtggcggaggggggtgagcagaggaaaatctaggcctgggacagagaggcagcctttgggcaatgggacagactggagactcttttagttttatgtaatgcaagggctaaggaaaaaactttgcctttgtcccctgaaggtttgctgaaaaatcaactgacaaaaagcagattaatagaagagaaggctggccaggcgcggtggcccacgcctgtaatcccagcactttgggaagttgaggcaggaggatcgcccaaggtcaggagttcgagatcagcctggccaacatggtgaaaccctgtctctactaaaaatacaaaaattagccgagcgtggtggcatgtgcctgtaatcccagctactcgggaggctgaggcaggagaatctcttgaacccaggaggcggaggttgcagtgagccaagatcgcaccactgcactccagcctgggcgacagagcgagactcggtctcaaaaaaaaagaaggcaaggtatataagtgtattagtgtgcgctgtgggaggagggaggaacacagagtgattacccatatcctagtggggtacagatgtttatatgtcttgttttttttaggggaaaaggagatggggaagtgtggatgattttagggaggtaacagatgatttttaggggaattcaatgagcttgaagaacatacaatggcttgggacaaagtctgtttgggcagacaatggtttgtgacaaaaatctttccaggtgtgttgaccgacttcagtgttttgccctgtgatatgggttcagttaatgaaaactcagggagggaatggatcagaggtgattgttttcttttttgccaggtctagacgttaggcagataagggaactccagagaataacttttattctgtgttttgggaggacagaaatgatgggaaagggaggaagatcagagatacattgaggcttcttcctcaattcagcatgtcaaagcgccatattttgggataccgctttctgagccccaacagtaactaggtattattttgaagggttgcattcacacttgtgacatggagtaaaggccagtggtaatatttctgtagagcgctttagttctgtctctcaatgtactttccttgttaactaatttctcctttagtagcaaaaggaattgtgacaggtgcatttaaagaaactgttacctgcaccaactaccaggcattcgttagttggggagaaatgagaactcatgttttccatactcagccctaccccaagatgacctggcaactgtacattttatcccactgggtttaatccttattatgaataacagagcgaaactttgttattcatgggagtggatttctcctgctgagagaattagcggcaatctcattcaggaagctgccttctgatgcaatgaggtcttttgaactgtgcataaatagaggccattctttaggcatttggagcatagggcttaaattgctccagaagttccaatcagactctaggtatctttggctgttttttttgtattttttttggttttttttgagacagaatctcactctgtcgcccaggctggagtgcagtggcacaatctcggctcactgcaacctctgcctcccgggttcaggcaattctcctgcctcagcctcccaagtagctgggattacaggcgtgcgccaccatgcccagctaatttttgtatttttggtacagacggggtttcaccatgttggccaggatggtctcgatctcttgacttcatgatccacccgcctcggcctcccaaagtgctaggattacaggcgtgagccaccacacccagccttctttgactgattcttctctgtgtgcgcatgtcctgaggtcacaagtggtagtgtgctccgtattggtttcttgacctgcctcttcaggactttctaaaattaaggtacaaccgattcttttgctgcagtcctttctgcctaaagaaggaagaaattcttctgttttcagaaaaaaaaaaaggaaaataaaagaatatgccagcttcaccaggataacccacagacattgagcattaggagtatggtacaaaaataatttctttcctcattaaggtttttttttttttaatttatgctacgagaaatagaacagagtgagcctattgttgtcttgccatcccagaatctcttaggaggacaaagagagatactttagtgtttgtaaagggagggttgactatttgtgcaggtttcaaaactcctgcaccccaagtccccagcagaataagcctctctgggtccattgaatggtgggtttttgaatggtggatctggggccttgtatggcagatgcacctgacagccataaccgaagcacatcctaagaatgaccctaaggttggccaggcgtggtggctcacgcctgtaatcccagcactttgggaggccgaggtgggtggattacttgaggtcaggactttgagaccagcttgggcaacatggtgaaaccccatctctactaaaaatacaaaaattagccaagtatggtggcgggcacctgtaatcgcagctactggggaggctgaggcaggagaatcgcttgaacccaggaggtggaggttgcagtaagccaagattgtgccactgcactccagcctgggccatagagtgagactctgtctcaaaaaaaaaaaaaaaaaaaaaaaaaaagaatgaccctaggatctaagaagaatgtgtgtttggacttccaagctaaggaatcggagagtggccaacctggagattcactccttatctatgacagacatccgaacccctagctcgttccttggaatgcaggccacctaggggatggaggccctttgctttgggttaaatggaggttgctaggtgggagggtgctaagtgaaaaacacaatataaactgcatgcttagtacaaacagcagtggttctcctgtccagcctgctgcccctggaatgccccttatgtaagtcctcaataaaccctgtctccctcactagctccgggtctctctctcttttttaatggagtctcccaggctggagtgcagtggtacaattatagctgactacaggcatgtaccaccacgcccagataattttaaaatttttttgtagaggcaggggtctcaccatcttgcccaggctgttctcaaactcctgggcccaagtgatcctcccacctcagactcccaaagtgctgggatttcaggcctgagccaccacgcccatcctgggtctcttttttggtgcctcggacatggtgccatccctgcttggagtcagcagaggtcttacgcgacagtccttggaatggtggaagcctgttttgttgtctttgatactatgaagggacaaacccctgctttgaaggtgtttatttcctgaaatttttacctgggatcccagctatctctttctttctttctttctctctctgtctctgggatcccagctatctctttctttctttctttctctctctgtctctctctttctttctccttccttccttccttctttctttctttcagatggggtcttgctctgtcgcccaggctggagtgcagtggtgcgatctcagcttactgcaacctccacctcccaggttccagcgattctcctgcttcagcctccggagtagctgggattaaaggcgcacaccaccacaccaggctaatgttggtatttttagtagagacaggggtttctccatgctggtcaggctggtgtcgaacttctgacctcaggtgatccgcccgccttggcctcccaaagtgctgggattacaggcatgagccactgcgcccggctgcatgacttttctataaagccttattttaaatgattttgggggcttaatttaggtgttttcatttgcttttggtcacagtctttatgtgtcactgagtgtgtggatgtgggggttcttctacccagaggaaagtgatttgatcacctggaaccaggtgctctgagaactggggcagcttccctgacttgcaggagagggtgcagagacttcttcgctggcatgtagctgcagcctagaaaaccgcttggtggtcctcgttcatgaacctgccgttgggggtgcttcatgctttatcttggtctctaccttgattaatctcacctccgtttctccgctccactggaccattctctagaacccctctagaaccactggaccattctcttctgtcagagtccagtgcttccagtctttcctgtgggctcttatcttctggtgcaaagttctttctcaccttccacagtcaaaatcaccatacttacctaggccatacttactaggctggagaggcaggtacatcaatctttcttgtttatttgtttgtttgtttgagatggggtcttgctctgtcacccaggctggagtgcagtggcacgatctcctccgcctcccgggttcaagtggttctcctgcctcagcctccccagtagctgggataacagttgcatgcaaccatgcctggctaatttttgtatttttaatagagacggggttttgccatgttggccgaactgctctcgaactcctgacctcaggcaatcctcccgcctcggcctcccaaaatgctgggattataggcatgagccagcatgctcagccaggtacattgatcttctaagtatttattgttctgctccttattcagtgctaacatttttattttcttattctttttccctgtcacttgaagatcgtcacccaagcaataaatccatttggttgtacttatttaattttctctgactttctaaggagtgacacagcaaagtgccttatcttgcatttctttccttttccgtgttctagttggaaaggctcagagtttgggagaagttaaacgtgactcagagaattgcttttgatggtggtgccgatacacacatcttttgaagcttagattgggtattgtcaatttaatttggagtctatcagcctgtagtgttctaatcacctattttgaagccttgctgacgacccgagattccttgttaaactgccactggaataagcataacacttttcattaaaggaaaaagaaaatgttacttaaagtaataggcacacccttttattttcttgacagatagcaaagaaaaaaatcttctgtctttaccttgacaagacatgtaccattgctgggaggttttgcttgtatgagaacttcaacgttagaatctagacatctcggagaattgaaactcaacaagtttctctgttttggggtggagaaaaaggacaaaaagttgtcatatacagctagctgtccaaacagtcaaatacgaaagctaatttatcttttaaaaggttaattctttgatgcctctatcacagttagtgttaaaatgaaagcattggaaacaaactctttttctgttagctcagattttaaaaaaattctttttgcagagatgggggtctcactatgttgctcaggctggtcttgaactcttggcctcaagcgatccttctgccttggcctcccaaaatgttggaattacaggggtgagccactgagccagattttgaatattttaattacttaactgcttgtctgtctggcaatgagataagcgcagtagccagtgattaccaacagttaaacagaagaacaagtcacataaacaacacttatacttcctgtaaacccaattaaaaccacatttcaggtttgctcttatgatttagaagtaaatttagaatcagtttcatgaatcttgcagtatttttcaaattaatgtctttaggcatttggacaatgggctgtgtgaatgcaaactgcgttttcttcaattgctatcaattagagacagttaagaactcaactgatgaagaaatagccacctgaaagtgagcccacaggcaagtcacaggcccctcttcctcctgaaggtgcacgggagacttcgttaaaaaaaaaaaagctgtagtaaaatacgtataagataaaaatttaccattttaagtttcttttttttgaagacgaagccttgctctgtcacccaggctggagtgcagtggtgtgatcacaattcactgcagcctcaccctctccggctcaagcgatcctcccacctcagcctctcgagtagctgggactacaggcgcacaccaccgtgcccactaatttgttgtagttttagtagagacgagattttcgctgtgttgcccaggctggtctcaaattcctgggctcaagtgatccacccgcatcagactcccagagtgctgggaaggtgtgagccaccatgctcggcccattttaagcattgtaaattgtacaatttagtggcattaagtattttcacaatgctgggcaaccatcatcactgttcactttcagaactttttcatcattccaaatagaaattccacccattaaacactaactccccaatgtccccttcccccaccctctggtaacctttatcctatgttctgcctctatgaattggcctattctaggtacctcataaaagtagaatcaatattatgtgttcttctgtatctggcgtctttttcttagcatgttttcaaggttcagctgtagcccatatcagaatctaatttcttttcctttttttgagacagagtttcactcttgtcactcaggctggagtgcagtggcacgatcttggctcactgcaacttccgcctcctgggttcaagcaattctcctgcctcagcctcctgagtagctgggactacacgcgcgcgccatcacacccagctaatatttgtatttttagtagagacggggttttgccatgttgaccaggctggtctcgatctcctgacctcaggtgatccacccaccttggcctcccagactgctaagattacaggtgtgagccaccgtgcctggctaaaaattcttttttgcacatgataaactcacctatcttaagtgtaaaatgaataagtttcagtaaaacaacaaaagctcttaagttttagtaaatccatacatctgtgcagccatcaccgcagtccagttttagaactttccattcccccctaaacatcctccttgcctgtttgtggtcagttcttgctcttaccctgatccccggcaactagtgatgtgatttacgtctctatagttttgtcttttctagtaatttcgtataaaaattatacaacatgtagtcctttgagactgaccttttttttttttgttttgtttttttttgagacagagtctcgctctgtcgcccaggctggagtgcagtggcgcgatctcggctcactgcaatctccgcctcccgggttcatgccattctcctgcctcagcctccagggtagcgggcactacaggtgcccacatcacgcctggctaatttttgtatttttagtagagatggagtttcaccatgctagccaggatggtctcaatctcctgacctcgtgatccgcacacctcggcctcccaaagtgctgggattacaggcctgagccaccacgcctggccgagactggcttcttttactcaacataaagtttttgagttcattcgtgttgttgaatgcatcagtggttgggttttttttttgttgttgttttttgagatagggtctcactgtgatcacccaggctagagtgcaatcacagttcactgcagcctccacctcctgggctcaagtgatcctcccaacgtcatcctcctgagtagctgggactacaggcacatgccaccacacctggctaatttttgtatttttgttttgtatagacgggggtctcactatgtttcccaggctagtctcgaactcctgagctcaagcagtctgcctgcctcagcctcccaaagtgctgggactacaggcgggagccatcatgcctggccaatagctggttcttgttttactgctaatagcattccattatagggatgtaccacattttgtttattcatcaccagttgatagagatttgtttctaattcggggctactgtgaatattgctgctgtgatcatttgtatacaattcttggatggacatgtgctttcgttcctcttgggaagatactttaaggagtggaattgctggggtttttttttttttttgagatggagtctcactctgtcgccaggctggagtcactgcaacctcctcctcctgggttcaagtgattcacctgcctcagcctcccaagtagctgggactacaggcgtgcgccaccacgcccagctaatttttgtatttttagtagagacagggtttcaccatgttggccaggatggtcacgaactcctcatgatccacccacctcggcctcccaaagtgttgtgattacaggcgtgagccactgggcctggccactgggtcttatattaaacttatgtttaacttataaagaaattgccaggctgttttccaaagtagttcttgcatttttttactctcactagcaacatatgagcgttttgggtttgccacatccttgtcagtacttggtattatccgtcttttgtttgtagcgattctaatgagtgtgtggtggtatctcactgtggttttactttgcatttcctgtactcttttaaaactgctttccattatagaacatgttgtgttgtgctgttatatatataaagcttctgctcacctgtgagctactctgtctagctgattgatccagtattgtgtccgggggcagggtacatggaaaatgcttagggtttgttgagtgaatgagcaaactgatactttgtaggagtggccaattttcaaatattttaggtaacagaaaacagtggtgaatcaactcaaaagatgaggtaccagtcaaatctcttcccttttgtcagtttctaagtagtattaaacttgagtgaactaagttttacttttttttcctttgctttgcttaccccttggtgagaggtaatggagaaaatatagacagagcaggaggaggaaagaaactcaatctcgaaatgactaagagcttgtggagcagcttgggagagaaccagctgggttattggctactctgtagttccaggtgtggggaattattctcatcaataccgtgaccgcctgccactcccctctgccctctttctttgtgttaattagagcaggggtctgcaaacattttctgtaaagagagtaaacaaatatgtcaggctttgtgggccaagagaaaacatcagcgacgttgtggaggtgcttacataacgacagacaaaacaaatttccatgaatttttatcgatgaaactccaaacatagtaatggggtacgattttctgtaacacaagtctgctaatgagaagaattgaattatttgagggaggaaaacattttgcttaattggaagttcagagttaatgtttcctatcatcatggtagaaatgtggcctcattcttctacaaagcttctctgatatgcagtggtcttccctcctgagaattcaccagaatgtactggcttgatttgcccttgatttgttggggaacttttcacatgggggaagcacattaagagtacaggctcgggctgggcgtggtggctcacgtcggtaatcgccagcattttgggaggccaaggcgggcagatcgcctgaggtcaggagttggagaccaccctggccaacatggtgaaaccccgtctctactaaaaatacaaaaattacctgggcctggtggcgggcacctgtaatcccagctacttgggaggctgaggcaggagaatcgcttgaacacgggaggcagaggttgcagtgagccaagattgtgccactgcactatagcctgggacacagagcaagactccgttctcaaaaaaaaaaaaacaaaacccaaaagaggacaggctctagggtaagactctggggtctgaattccagctcaacaacttattaactatgtgatctttcactacttacataacccatctaaaagctttggtttcctgatctataaaatgaataatagtacctatttcacagagttgctgtatagattaaacacaaagatttagaatgacatattatactttttattcttcttttgattttttttcaaccatttaaaaatgtaaaaccattcttaagtcatgggcagtatgaaaacgggtggcagggcctgcaggatatagtttgtggaccctgcattggagtatgaacttgaattattgccgtttactttagaaacgatgattgcttttttcctaattgcaaagcaccatatgttcactgcagaaaacttggaaaacacaaaaaagcacaataaaacaaaagccattcagaatctccaccatccagagacgtttcatgagtagtatgttgccccatagccttccagacaattgtgtacataatacacatatttcattattttttattttcctttttttttttttttttgagtcagggtctcactgtgtcacccaggctggagtgcactggtgcaatcacagctcactgcagcctccacctccagggctcaagcaatcctcccacttcagccccctgagtagctgggactacagctgcatgccaccaggcctggctaatttttattattttttgtagagatggggtcttgctatgttgcccaggctggtcttgaactcctgagctcaagtgatcctcctgctttggctttccaaagtgctgggttaacaggtgtgagcctctgtacccagcctacacatatttcaaagtaaaacccaagcccatactatgcatactgctttgtatctttttcacctattaatatgcaatgcttgtcattaatattcttctataacctgaattttaatggccacatactattctgttatactgtgttaaaatttactaaagcaatttccaacaacattaatgctgttttgaatttttcaccattagactgaactcagcaataacctggtacatacatgcttatacacatctcttgattcattccttgggataaattacaaaatttaatcactgggtgacagggtatctacatttttatttatttatttattttgagacagactctcgctctggagtgcagtgatgcaatcccggctcactgcaacttccgactcctgggttcaagcgattctcctgcctcagcgccagagtagctgaggttacaggtgcgcaccaccatgcccagctagttttttttgtttttttttgttttttttgtatttttagtagagatggggtttcaccatgttggccagactggtctcgaactgctgacctcaagtgatccacctgcctcggccttccaaaatgctgggattacagacgtgagccaccgctcccagctgggtatctacatttttaaagctttggtgtatcttgcaaagttgtctcctaggaaagttgtatagttagtcattcccagatgatgtatggagcactgttgtttcaatgcccctcttatatttttacttggttactgggtttgtgaacttaaaaaattaaaacattcttattttaaaaacaattcaaatatataaaacatgtacagataataatgaaacgtacacttatgtacccagcagaaagattaaatcggtgttaacattttgctgtatttgcatttgttacttttaaaaaacacattccagattcaaaaacaagtctattattatcatcccattttacaagtgaggaaactggctcaaaaactttaagtaacttgtctaattcttaagaaccagtaagtgggctgtaaagaaccagttgatcctaatgatgcttttaccttaggcttttactgatattaatatagcccttccagtcttcttcccctttttggtcagtttctgtctggtacatgttttctaatgtctctacttttaagttttgtatgttgttgtattttagatgggcctcttgtaaatagcttatagctaaattaagaaaaaaatctcgagtctgggtttttaaaccagctattaataacctgttttttaaccagctatttcagtctgtttgcatttatagcaattgttgatgttttttgaattatttgtcttatttcatgctttctatttcccatactttttctgttttttctccatttcctgtctcctactgaattgagttttaccaggttttctctttttctctctactagctttgttatcctaaaaatattcaatgtgtatacttaaatagcagtcagaaattaccctatcacctcccccacccagtttttttcttatttagtgttttaatttctccttttttggtattttattgtattttgtattttattcactgttatttttgttgttttgtgcagcccaaactgtatatatttttatttactagggtctttactcgtctttctaagtactcttttatgtacacattttattttctgaaaatatatactttagtgcattttagtaagagcctgtgaatgtacttagttcttgtttaaaaacagcttctttgtcctcatctttcaatgactctcttttagcttagtatagaatctcccctcaaccctctgaagatagtatttctttgtcttctcaacttttcttttcctcatttgttttctcaacttctcaaccctcttttttcttatttatttggaaatggggtctcactatgttggccaggctggagtgcagtggccactactgatcagcacaggagttttgacttgggctatcacttcacccctccttaggcagcctggtggtcccctgatcctgggagatcaccatattgatgccaaacctagtgtggatacctgtttggaatagtgcactacagcccagacctcctgagctgaaacgatcctccctcctcagcctctgaagttgctgggactatagtctcgtgccgccaaaccctgctcagctctcatttgttactgagaagtcttctgtctgattgctcttcctttgtaggtaatctgccatatctctctggctgttttttgttttttgttttttgttttttgttttttgagacggagtctcgctcattcggcccatgctggagtgcagtggtgcaatcttggctcactgcaagctccgcctcccaggttcaagccattcttctgcctcagcctcccgtgtagctgggactacaggcgcctgccaccaggcccagctaattttttttgtatttttagtagagacggggtttcaccgtgttagccaggatggtcttgatctcctgacctcatgatccgcccgcctgggcctcctaaagtgctgcgattacaggcaggagccaccacgctggctatctggctgttctttaggcttcctctttgtctttgaaattctggagcctcagtcctgtgtgcatggattcatttttatttattctgcttagaacttggtattctttacacggagaattcatgacttttacaattctggtaagtccttaactattatcttttaaaatgttgcttctccttcactggggcagccataaaatcatgctgctcggttgtcttgctggaggaagcatagttgactgagccccagaggccatgtctcagattcactcacgcttctcctgggctgctcccagctgatggcagaatatgacaggggtaccagtgctggcccactgctgcaggaggtaggatcctttcatggatgacattggctcctggactccccatcagtgtgaccaaactttcttacatctgcgtctcactctgagtctcttcctacccagtactcctttcttctctctccatcatacctacaccatggtctgaaggctctccctgcctcctcctgcttcctcctctttttccttcacaggtgtttttcccaacatctcgtctcagcatctgcttcttggaggacccaaactaacaccgtatctctgttttcatcatctgaatcttgtattagatgcatatggaccttctcattgtgctctctatgcccttagttattcttttatgcctcattgacctctctaatgctctttgggtaatttcctcagatctgtcttccattttactgaattctctcttcatttctgtctaatctactatttaatctatctattgcattttaaaattataatatttatttctaaaagtaccatttggcttgttttcacatctgactcttacttttttcccagtatattcttctcagggttttagtttctcattttttgtctttaacagtctaaagcacacttacattgtactccctctttcaaattgtagttttatcattccaagttccctggagctctaataatcttgtttgttgtatttgctgttttctgcttatggtgtattctaatttttaattttcctctaaactaacctttagtgggggttattttttttccgtgggaatcttacatggtctgatagtgaggctccttcagaacaattagcattgctcagaacaatttgcattgcttcttctagagatctcaggagtgtcactgccttggggccaatatttctgttaatttcttagtttagaacggcctggatcaccccgcttaaggctcaggtttgggatatccatttttcaggggagaggtttttttcacttagaacccaagaacacaaaattgttctcctagacccctgtaccaggggatgatttttccccctagtctttcttttcactgggaagtatttctttgaagatcctaactctctttggggcttttttttttctttttctttttttttttttttttttttgagactgagttttgctcttgtcgcccaggctggagtgcaatggcttgatcttggctcactgcatcctccgcctgccaggttcaagcgattctcctgcctcagcctcccgagtagctgggattacaggtgtgggccaccacatccagctaattttgtatttttagtagagaaggggtttcaccatgttggccaggctggtcttgaactcctgacctcaggtgatccgccccgcctaggcctcccaaagtgttgggattacaggcgtgagccaccgtgcccagcctctttggggttttagttccaactctctgcttcatggtgactcatggtttcacctcctttgtccacttgggttttaaattgtaagtctggaagttactagaacaatcccagaattagctcacacactttcactctgtttttccctttcttcctggggttatattttacccagcattcctaggtgtttgtggtgggagattccgcccctacgttatcttaatttgttgccatatttctgaaccaggaatcccatttaccacattgagttctggacatcaaggttctccgggcatcactttctatgctgtgtcatcagtgaagcccataaacttacccgttatcagaaaagcgaagatttcgagatcttgttgagacggtaggtatatagtatgtcctgaggggtttagaaaaaatagctacctttatttccaacccatggtaacttcattggtaaatccagacagacctgtaagatttttacaaatggaaccagcagcttagaaaacaaaaaataataattactttatcatcacaagtattccttttactgcctcagcccagtaacagagctcttctatctctctcgtttctttctcccagctttcccaccatccttctcaatttgtcctttgtcaacagggcagaaaaggggttgaagtgatgtatgggtgtaatccactgtgcactgctgaaaagataaacttaaatgaagtgatttataacctgtggcaggtattctgcacccagaattgtttgtcaaagtgagtgctcattgattttccatgccttccgtgtcagcccctggattgccattgttccttagaggtggctaagcagtttaaggcatcagggtgttctcccagcgcgggcactcactccgctgcagggtttagccttcaactgtgttccagggctcggaactccctagttgaccccttgctgcaggaggcaggattctttcgtggatggcattagctcccagactccccatcagtgtgaccaaaattttcttgttttttttttttgaaacagagtctcactctgtcagccaggctggagagcagtggcccgatctcaggtcactgcaacctctgtctctcgggctcaagcaattctcctgcctcagcctcccgagtagctgggatgtgccaccacgcctggctaatttttgtatttttagtagagacagggtttcaccatgttggccaggctggtgtcaaactcctgacctcaggtgatccactcacctcggcctcccaaagtgttgggattacaggcatgagccaccgtgcccggccctttcttttttctttttctttctttcttttttttttttttttttttttgagacggagcctggctctgtcacccaggctggaatgcagcggcgcgacggtggctcactgcaacctccacctctcagattcaagtgattctcctgcctcagcctcagtagctgggattataggcgcgcgccaccatgcctggctaatttttatatttttagtagagatgaggtttcaccatgttggccaggctggtcttgaactcctgacctcaggtgatccacctgcctcagctcccagagtgctgggattgtacaggcgtgagccactgcgcccggccagtgtgaccaaaactttcttacagctgtgttgcactctgagtctcttcctacccggtactcctttcttttctctccatcatacctaggccatggtctgaaggttctccctgcctcctcctgcttcttctctgctaccatccacactcactgtgtccatgaaaagaccagattccactggtacttcagatttctcaaatgagaagtaaaacatattctataagttttgaaaatgcttctataaaatgcttctggaatcttcctactggaagtcaaatagataataggtccccatagaatagcacgggacaatagtacagcttcgggggcggtgcccagggaaatctgggctgagttagatgaaggatactaagcatcctatgggaactcatgcagcagggagtctccttcgcttaaggggaccacatacatatcacacaggatgtgtctttcttgtttttctccaaacccatcccgttgtgttggagggtgatgaagtttttccagcaaccacagtgcagtctggtgaatcagaatcagtgtcattgagcctcagcaacacccagatatccaagagattgtcttaaagaatcttagaactgtaggctgggtgtggtggctcacacctgtaattccaaaactttgggaggccaagaggatcgcttgagagcaggagttcaagaggatggcttgagggcagaagtctgaggctgcagtgagctgtgactgcaccattgcactccagcctgggtgactgagggagaccctgtctctaaacaaaaacaaaaacaaaaaacttagatttttggaccttagatcatttaatctagagttctaactcgataggcaaggaatctgaagcctggactatttgatgacttgctcagggtcacagaactatggagctccacagccagcattacgacctgggtttctggacttcctgctcatccctgtttctggaagggcttctgctccaggtctctctgggtaatgtcccatttgctttcacaacatgcctcttgaatctaaagaaagcagtgctgttggtggttgtcttagttgcagtttatttgcttggtcctttgaacaggaagagagttatgtttattatgggttgggaggaatgaacttgcctacacctttttttttttcttttcttttctttttctctttctttctttcttttttttttttttttttttttctgagacagggtcttgctctgtcgtccaggctggagtgcggtggtgggatctcagctcactacaacctctgcctcctgggttcaagcaattctcctgcttcagcctcctgagtagccaggattataggcgcccaccaccatgtccagctaattgttgtattttcattagaaatggggtttcactatgttggccaggctggtttcaaactcctgacctcaggtgatccatccacctcagcctcccaaagtgctaggaatacaggcgtgagccaccgtgcctggctgcactttttcttttttctgttgtgtgcctaagacatggttatctagacaaaaataccacttagtaggcactttaccaatacatatcatgctagaaaacagattgctttcatgcaaatgaggtggagctaggaaagttatttatgtaatgattatttcacaattggaatttttttttttttttttttttgagatggagtttcactcttgttgcccaggctggagtgcaatggcgtgatatcggctcaccgcaacctccgcctcctgggttcaagcgattctcctgcctcagcctcccaagtagctgggattacaggcatgggccgctacgcccggctaattttgtatttttagtagaggcggggtttctgcatgttggttaggttggtctcgaactcccgacgtcagttgatccacccacttcagcctcccaaagtgctaggattacaggcgtgagccgccgcccccggcaacaattggaaattttttaaaaacaaagactatttagcttgagctcaactaaagactttggtttgcatattatagacaaatacataaattgtgtttatatagactgtgtacatatataattatatactgatgagatatagcatttgtatttttcaaaccacaaacatcctgtagtaattcagacttataaatacttctgcatagcaagtaacaatttataatagctaaacaggaatgaatatggatggtgtttctttgtgcctctgattggtgggtaggggggattgaaagcttgattttgatcagtttttttttaaacttatgtgcattattgattaatcacttaattgaattggtgggatatattttcatacatgcagttgtggcaatattgattgagctttctctgagcccaaactaccaattcttacaagtgaaacaggatgtcatctccgtgttgtaatcattttatacttcacatagtacattggaagtctgaggtagcaaattcggcttccggaagtccttgacttggggtcaaagagcatcgctgatatcaggagaagctgcctgaatgtgaattcggtagtaaaaatggaaagatattttatgtgtttggctaggcgcagtgcctcacacctgtaatcccagcaccttgggaggctgaggtgggcagatagcttgagctcaggagtttgagactggcgctgtgggcaacatggcaaaaacctatctctacaaaaaaatacaaaaattagctgggcatggtggtgcacacctgtggttccggcggctacttgggaggctgaggtgggaggatcgtttaagcccgaaaggcagagcttgcagcaccactgcactccagtgtgagtgacagagtgagaccccatttcaaaaaagaaaaaaaaaagagccaggtgtggtggctcatgcctgtaaccccagcactttgggaggccaaggtgggcagatcacttgaggtcaagagttcgagaccagtctggccaacacagtgaaacctcatctgtactaaaaatacaaaattggccaggtacagtggctcgtgcctgtaatcccagctattctggaggctgaggcaggagaatcgcttgaacccgggaggcagaggttgcagtgagcagagatcacgccactgcactccagcctgggcgacagaacgagactccatctcaattaaaaaaaaaaaaatgatattttctgtgttcatctaagtagagaaataagtatagactgccttatgttcatttgcttcccagtgttccttggtggctggattattcatctaagtgagatgtaagatcttttgagcatctaacataatagttattcataaagacatttaggctgatggctttctcagaacgtcctgctgttcatgatggacttcatctatatttcaatgaatttctaaatggaggaaacagaacatttttcctttgattaattcattggttttcagtcctcaaggacccataggctggcgaactctaagaggaagtcacaaaaggaagaatggtaaattggaattggaactgtggaactcaccccgtaaaaatctttcaacactgtcctgagttcaacatctgaaatacagtggaccaggagaagattgatggaagctaatttaaaaagctaatttaaaattgcaccaaaaaaagcacagcgttatgaatttaataaagttcgtagggtgttttggaccacgattttacaactctctcactttttttttttttgagacagagtctcactctgtcacccaggctggagtgcagtggtgcaatctcctctcaccgcaatgtctgcctctcgggtccaagcaattctcctgtctcagcctcctgagtagctgggactacaggcatgcaccaccaggcctgattgatttttgaattttattagagatggggtttcactatgttggccaggcaggtctcaaactcctgacctcaggtgatccacccgccttggtctcccaaagtgctgggattacaggcgtgagccaccacacccggccacaactctcacttttaattgactgtgccccagaatcaagcactttggctagcaaatgatggctagttagatcacagaggtgtgtgttgcattctgtgtctgttcactgtgaaatcgggattttaagagtgtatgttgttgaacatacacctgtctttgagtgatcggtccccagaggccacctctaaggtgaagatttggggaggtaattgtgggaagccccaggaggagcagaggaaaatgagaaaggggacgaagggaatgtaatagaatgtgtgttgggagagggtttccttatgagccagtgcagaggaaagtcttgaaatgcactaaggaaatacagtctgtgccgtgatggtagcaccgatgtggaatcccataagcagctgcttgaaaaagacttggtggcagacataactctttttgccttttaagtgctccgggagatttcacatgccaatgttgaattgtccccaacttgggttcagggtgcccaggaactagcaaaatcagcttttttgtggtaggatcttcataggatccaggagctgtcacccacgaatgacagagcccctgcactggatagcctttctccaatctgtataaggtggaatagggaaatgaggctcctctctgatgttcggggctttagctgggctgggttctgagtcctctgtgcctagttccccttgggaagcactggagaccttgaactggaaattctcttcctgggatcaaccaaatactcccaaaacttcgtggaagcttagctccttgtgccttttgtcaggtttccctagaagtcaagggattctcatggagatgatgtatgggatgggggctagagggctgggaggatggtagggcgggggtaaatctaaacttcaggtgtcttgggagtccatgacttgcatcacagagctggtttcccccccgtcaggcaaggtcggcctttatttatttatttatttatttattttagagacagagtctccctctgtcacccaggctagagtgcagtggtgccatcatagttcactgcagccttgaacttctgggctccagcgatccccctaccttagcctcctgagtagctgggactacaggcacacgcccaaatgcataactaatttttaaagtttctgtagagatggtggggtgggggggtgggggggggcgcgtctcacgatgttgtccagtctggtctcaaactcctggcctcaattgatcctactgtcttgacctcccaaagcactggaatttacaggtgtgagccactgggctggccaaagtcagccttttgtacccctctcaatgtcagccattgattggttgtgggcctcccacaggtggagaggttcccatttgttcaaacgcaatttacaaacaagggggcagatgggacccattagtagctgaaactcacagcaaccagtgcctagtaaaggattcatgcagggccctcccacacgacccaaaacagcaaagagaaagggccaggtgttggcctttttctaactcatcccttttaacacagtaagttcagcagtcctctaagagtcccacttcaaagtacccctcttgccttccgaattcagtgttgttagcccttttgcttgaaaaacccccactcttggacacagaggaaataggagtcagatgtctgcaccttctgcacctgtggtttgaacaggaccctctgggagtcgcaggaggagtgcttggccctggtgcttggcaggaggttgggctgggagatgatgattgccttgatcctctctttcaactacttcattccaactgttggaatacctcagtagtgagtattaattttcttcccccccaaatccagcaagcaatctagctccttaagagaagactatgttcctgctattaacagggctttgactgtttttgcaaaataataactgggcattcttgtgttaaggaccatttgtttccttcacctgcttttcttcccaatttagctgaaaagggacctgagccagttaggagatttttttttttttttttttttttgagatgaatcttgctctgtcacccaggctggagtgcagtgacatgatctcggctcactctcaggttcaagtgattctcctgcctcagcctcccaagtagctgggattacaggtgtgcaccaccattcttggctattttttgtgtgtgtgtgtttttagtagagatggggtttcaccatgttggccaggctggtctcgaactcctgacctcaggtgatccacccgcctcagcctcccaatgtgttgggattacaggcatgagccactgtgccccgctggagactttttttttctgaactaaaatatcttttcagatacaaggttcagggagggtggtgtggaccagtgagagaagtttcatttgcacctttttcatttttattctgatccagagtgactggagtattaatggatgttgtcataggcttttgaagtggccttgcttggtgattgagtggctctcgcaaaattctgaattttggaaccaggtattgctttctagctatactaacatgtccctttaggagtctaatgagatctgctttgcctctgccccaaacagatttgctttacaagttactgtcactcagggcaagctccaagctctgtatctaaaaagcaaagccacctgccagccacaaccaggtgcatgttgcctttgggccttgtgtcaaaatatcttcatcatctaagaataaaacccccaaagaggtcagcctgatcttgtagaaagccgtccctgggaaaatgattaaatgtcagtaaacaagagcatttcagaaactgacatggtccctaatgtttgtgtttagagactcctaatgtgtcagaattgagttggagacttacgatgtaattgcatgtcttgtatttcatgccagcctctcggcttggtgctggggcagagtgggaagcagaccacagagcagagagggcctctgcccttttattgtcctgtgagagagatggatattcacaaataatcctgtccctaattaattgcagctgagataaccattataaaagaaactagagagtgtgacaaggggtgactatctcttggtcttggttgtcaggcaatgctatggaagggttatttagagtcgtagaagtgtctagtacaaccaccagctgatgaagatagtacaggaggaagcaggcatgtttgagacatggtgagtttcaggctcaattaaggagctggagatagctaccagctgttagcaacactgggggcgtgcaggagcagcatcagggacagatttgggagtcccttggggaagccgtggtgaagccacaggaatgaacaggtggctttctttcctttttttttttttttttttgagatggagtctcactctgccgcccaggctggagtgcagtggcatgatctcggctcactgcaagctctgcctcccaggttctggccattctcctgcctcagcctcccgagtagctgggactactggtgcccaccaccacgcccagctaaatttttttgtagttttagtagagacggggtttcaccgtgttagccaggagggtctcgatctcctgacctcgtgatccgcccacctcagcctcccaaagtgctgggattacaggtgtgaaccaccgtgcctggccgcttttttttttgagacggagtcttgttctgttgcccaggctggagtgcagtggcactatctcggctcactgcaacctctgcctcccaggttcaagcgattctcctgcctccacctcccaggttcaagcgattctcctgcctcagcctcccaagtagctgggatcacaggcacccaccaccacgcctggctaatttttgtatttttagtagagacgaggtttcgccatgttggccaggctggtctcaaactcctgacctcaggtgattcgcctgcctcggcctcccaaagtgttgcaattacaggagtcagccactgcgcctggcccaggtgactttcttgagagagtatggagagggatctgggagaatgtctggatgaaaccttctttaagggcctgtcacctacatgcaataaagaccatactaattgtaataagaccattgtttactttttgttccccaactggtgcaattttcccagtccctgtagtagccccaggatggctcagaaactgtctgggttcctgctgtagacactgtgagaacttcctttccaagtgtagccaagcacccgccccactgctgcagcctgtgccatcctcccccttctctgcacacattgcatatccctgtggtctccgttttgagctcagagtgtgggcctccaaccctcagcaccgtatcactccgtagcttattagaaatgcagaatctgcagcccccgcccagcttgctgaatcagcctctgtgttttaacaagatccccgggatctgtctgcctgttgacaagggagaagcctggtctcggttacctcctcctcagcgtcctgagcctggctggatcgccagcacactcagaccagcggccccaggctcttgtgacagcagccgtcagacccgtgggagttcaggtgcgggtcatcagggccctgctggctactccacctctctgggtccctcagctcagagattccacttgagtgtagagagaattgttcccctctgctctggtgccctctttgcactaatgtttagggacctagaaagggcatcaggaaataagacagaacaaaagccaccaagaggaagaaggaaattcaagtgccatagctatagagaggctcaggaggataaaaacaaagcaatagcaggggctgagagattttttaaaaatcagctttactgtgatatataatatatatatgtgtgtgtatatgtatatatataatttttttttgagacagaatcttgttttgtcatccaggctggagtgcagttgtgcaatctcagctcactgtaacctccgcctcctgggttcaagcgattctcctgcctcagcctcccaagtagccaggattataggcacacaccaccacacttggctaatttatgtatttttagtagagatggggtttcaccatgtcggccaggctgttttcaagctcctgacctcgagtgatctgcccactttggcctcccaaaatgctgggattacaggcatgagccaccacacctggccatattgtgatatagctaacatagaatagaactcactttaagtgtacagcttgatgagttttaacatatatatacacacactgtagtcatgtaaccactgccccatcaagatacagaacatttcatcacccctagaacttcccttgtgacttttagctgtcaattacttctctctaccccccacattccccactcctgttcctaacaagcactgatctgcttttgcactaaagtcttgcctttcttaaagtttcctatagatgcagtcatacagatgtagtctcttgtgtctcacttcttttgctcaacacaatgtttttgaaattcatccatattccccgtccgggagggaggtggggggggtcagcccccctgcccggccagccgccccgtccgggaggtgaggggcacctctgcccggccgcccctactgggaagtgaggagcccctctgcccggccaccaccccgtctgggaggtgtacccaacagctcattgagaacaggccaggatgacaatggcggctttgtggaatagaaaggcgggaaaggtggggaaaagattgagaaatcggatggttgccgtgtctgtgtagaaagaagtagacatgggagacttttcattttgttctgcactaagaaaaattcctctgccttgggatcctgttgatctgtgaccttacccccaaccctgtgctctctgaaacatgtgctgtgtccactcagggttaaatggattaagggcggtgcaagatgtgctttgttaaacagatgcttgaaggcagcatgctcgttaagagtcatcaccaatccctaatctcaagtaatcagggacacaaacactgcggaaggccgcagggtcctctgcctaggaaaaccagagacctttgttcacttgtttatctgctgaccttccctccactattgtcccatgaccctgccaaatccccctctgtgagaaacacccaagaattatcaataaaaaaataaattaaaaaaaaaatgtaaaaaaaaaaaatgtaaaaaaaaaaaaaaaagaaattcatccatattattggatgtatcaatagtttgttcctttttattgcatagtagcattcccctgaatggatataccacagtctgtttattcatttaccagttgatggacatttgggttacttccagttttggatgattttgagtaaagttgcaatgaacattcacatacaagtccttgtgtggacctacgtcttcatttgagagatttttttccttttaaactttttattttattaggttggtgcaaaagaaactgtggtttttgccattactttcaatggcaaaaaccacaattacttttgcaccaacctaaatcttccctctctctggatttgcaattattctgtaaatctaaagttaactttagctaaatcaggttgacatcatataccccctaaagttaactttagatttacagaagagttgcaaatccagagaaccccccgtagtcttcatccaccttcccccaatgttaatatcgtactaattatgatacatttatcaaaactcaaaaattaacatgggcacagttgtattaactaaactcccgactttcttcagatttcaccagttttttccactaatgtcctttttctgttccaggatttaatcaggatataatgttgcacttaattattatatcataatagtcactttcaatctatgtcaatttctctgtctctccttgtttttttatgactttgacatttatgaagtgggctggtcaagtattttgtaggatgtccctcaatctggatttgtctgatgttttctgatcattagactgcagttggggtttggggaaagaataccccagaggtgaaatggccttctcatcacataatattagggggcacatgatatctacctgattgctcactggtgaagttaaccttgatcacttggttaaggcgttgtctaccagagttacccaccgtaagctgctaatttccctttccatactctgttccaggggtgtccaatcttttggctgccctgggacacattggaagaagaattgtcttgggcaacacataaaatacatcattaacactatgacagctgttgagctaaaaaaaaaaaaaaaaaaaaaaaaaaaaaaaaggaccgggtgcggtggctcacacctgtaatcccaacactttgggaggccgaggcgggtgggtcacgaggtcaggagatcgagaccatcctggctaacacagtgaaaccccatctctactaaaaatagaaaaaattagccgggcgtggtggtgggcgcctgtagtcccagctactcaggaggctgaggcaggagaatggtgtgaatccaggaggaggagtttgcagtaagccgagattgcaccactgcactccagcctgggtgacagagggaaactctgtctcaaaagaaaaaaaaaaaaaaaggtctgtgcataaatatcataatgttttaagaaagtttatgaatttgtgttgggccacattcaaagctgtcctgggccacgggttggacaagcttaccgtctattcattagaagtgagtcactcaggggagggagattaggccctgcctcctacagggaggggtttcaaagaatttgtggacatatgctaaaaccagcaccataattaatgtggtatttttttttttttgacggagtcttgctctgtagcccaggctggagtgcagtggcctgatctcggctcactgcaagctctgcctctcaggttcatgccattctcctgcctcagcctcctgagtagctgggactacaggtgcgcaccaccatgcccaactaatttttttgtatttttagtagagaaggggtttcaccatgttagccaggatggtcgcgatctcctgacctcgtgatccacccgccttggcctcccaaaatgctgggaatacaggtgtgagccaccgtgcccggccaattaatgtatttttattattttaaaagttattcttatttttagagatagagtctcactatgttgcccatgctggtcttgaactcctgggctcaagctgtctacccacctcggcctcctaagtgctgggattataggcgtgagccactttacctggcctgcttgtttttttgagacagagtctcgctctgtcgcccaggctggagttcagtggcacaatctcggctcactgcaagctccacctcctgggttcacgccattctcctgcctcagcctcccgagtagctgggactacaggcgcccgccactacatccggctaatttttttgtatttttttagtagagacggggtttcaccgacctcgtgatctgcacgcctcagcctcccaaagtgctgggattacaggtgtgagccaccgcccccggccctggtgtgctttttaatattttttggagatggggtcttgttatgtttcccaggctggccttgaactcctgagctcaagtgatgctcatgcctcagccttcagagtagcaggcattacaggtgcatgccacctcacctggctaataaatgtttttggagggatgtgttgagcctatgcaggtatcctgtttccccttaaagtttgcccatgaacttaacattcctcagtggaccctgcctgcagctattattactgtaatgttctcctggtgattttctattctcccatgccttctgcctttattacatggaattcttctgtaagggaaatttgtttcttctccaggtatttgtttatctatcctctcatttatttatatcagtgtggactcacaagtacttattttattctctgggtgagagatgtttttaagatgggaaaatggactactttaagttaacctaactgtgagccaggtagcaggaggtgtggggaggaggagcatagatgctgggggaggaatgggcggtggatggagcgaagttcctaggaaggtcagtgagaaggagatccggaggtgggggtcttggcaaaaacaagggacaccctgttcccacaaatgggtaagaggaaagtttgggagggtcgatttccatgtcaggaaggagaacttgaaggagttccaactaattagcttttgtcttctccgtcaagatgttttctgtgacgacaatgggaagttgacttttggaattttaattgtcttggccaaaattcctggcctctagagtaacgtttctcaacctcagccctgccgacatttggagcagataattcattgttgtgggagccgtcttgtgcattgcaggctgtgtcgcagcatccctggcctctaccctctagatgctttagtgccctctcctgtttccccagcagtgaccaccaaaatgtctccaggcagtgtcaaatgtgccctggggagcaaaatcgccccatgctgagaaccacagatctaaaattaacacacacaattctggcaatccgtaggattcttcttctctttatttttatttttttgtctccctctgttgccaaggctggagtgcagtggcatgatccatagctcattgcagccttgacctcccgggctcaaacaatcctcccacctcagcctcctgagaagctaggactgcaggtgcacaccaccatgcccggcggcttttttttttttcttgaagagggggactcactgtgttgctcaggctggtctcaaactcttgggctcaagcagtcctcctacctcagcctcccaaagtgttgggattataggcatgagccactgcatccagcccacgggattcttgaccattactttgaaagactaagatgatggcattcacctattaattttctgcagaaagagctaagctgctctagtgtgaacactcaacgttgacgctatggatgagggagggccctgctttcttgggaatagcggatggtcctttcagcacacagcacagatgaatgaagaggaaatgaagttctggttcgcagagggtctttggttctgaaaagcgttgccgtggttctagccttcctcgcggtggagggtgttttgctttctgcgcggtttctgtgtgggccgtgggaagcaacttgattgttatcacagttggggacacagcagctcttctcataggttaatttctgaaagcccatttgttctaaatccaacgtgacgcctaccgagctgggtacaacattggtttgtttcataaaacagcccggggtgtttgggactcttactcctttacaactctcatttgactgtccaaagatgcttgcactggggcctaattttctgtcaccttccctacgtttttaacaagacactgccatttcaaacatagcgaacacgacagattgaggaacaaggccaaggcagaggctgcgacgacctcgtacagccgctgatgccatctgttggtggctggcagaactgatgccctttgctgcgagggagctttgtttattgcacagaaagttgaaagttggcagcagagaaccttgttaccacctgggaggataggattggcaggattagggaggactggaaggggagggaatgcgtgtttgctttgtaggttgtgcatcagtaagcacaatcaggattcagtgccaggaatccatagttgaaacaattttaggaggatttttcaaggttctggctgggatgccatggggacctccaatccatttctcagtcgactgtcagttaaggcattgggctgtgggaagttaacagagcaacagagcggtctctaacgtaaaaaaaccccagtgtctcccatagagctagcatgcagtccttatttgtggaatttgatattgagggacagtattaactcctcactctaatcaaagaagctatgataatatgatgcaaaacaactattatattctatccccttccaaagtgctttcaaagactaaatttgtcttgataccaatccatttataccaacacatccccacatttctgatgatgaaacagattcctagagactaaatttctttcttttctttttttttttttttgagatggagtctcgctttgtcacccaggctggagtgcagtggcacgatcttgggtcactgcagcctctgtccccccaggttcaagtgattgccctgcctcagcctcctgaggagctgggattacaggcatgcaccaccatgcccggctaatttttgtatttttagtggagacggggtttccccatgttggccaggctggtcttgaactcctgacctcaggtaattcacccgccttggcctcccaaagtgctgggattaaggtgttacccaccacgcccggcctagagactaaatttcttaggtccatatgtctgcttgatagcaagagctggaattagttcagccagtgggttcttaactctggatgcatataagaatcacctgggaaacaaaaaaaaatcttagtggttggcttcactctcagatatacagatttattttttaatttttgtttatttttttgtagagatggggtctcactatgttgcccaggctggtcttgaattcctgggctcaagcaatactcccacctccacctcccaaagttctggcattacaggtgtgagccactgtgcctggccagatatatggattaacggggccgggccagggctgggtcctgggctgtgattctaacctgctgcctggggttgaagcgcttctcctccaggtgtggtccatgaaccagtcgcatcagcatcacctgcgagcttgttagaaatgcagagtctcaggccccaccccagaccctctgaatcagaacctgcattgcaacaaggttctcagatgattcctgtgcatggcgaagtttggaaactctgagtgttgcttttgagatcagacatacagtgctatccattggtgtctgtggaggatgtcttatttgtttatttatgagacaggtctctgtcaccagggctggagtgcaatggcatgatcgcagcacactgcagcctctaccttctgggctcaagggaccctcctgcctcagccccccaagtacctgagactacaggtgtgtgccaacacacccagctcttttttttttttttttttttttgagatggagtttcactcttattgcccaggctggagtgcaatggcacagtcttcactcactgcaacctctgcctcccgggttcaagcgattctcctgcctcagcctcccaagtagctgggattacaggcatatgccactacaccagctgattttgtatttttagtagagatggggtttcactatgttggttaaactggtctcgaactcctgacctcagctgatccacccatcttggcctcccaaaatgctgggattacagacgtgagccaccgtgtccagcctgcccagctcatttttatttatttatttattttttggtagagacagggtcttgctatgttgcccaggctggtcttgaactcctggccttaagtgatcctccacctcagccccccaaagtacttggattacagattacaggcataagccaccgcatcaggtctgtttaatttttaccattcagacagcactcaaggcctagtgtgagtggcctccatcgagggccctgggcttccctctaccctgagggttccatgtgcctcccaggttgaagccatgagagagtccagaactacccccaccccaaaaaaagtcttgctcatggccagctgagtgttccacagcccttgatttctgggtgtgtcataatgtagtcaccaagtcaggcctgtgggctgcctctgggtccttcctgttgagagtgatggcatgtcactgctggcttccccgaggatgagaggttcaacttgtttggttcggcccctaagattctcttacattacctctagctcagacactctgcttgtattggaaaactgggaggcagtgccttttcctctttcttcctttctgaaatagaaggtactcagtagatgttggatttggaatattggaatgaaatgaaggctgtgtgggcctctgggcagcctttggtgttagaaacaggcttcatccctgctggacttgagtttcagttgaggagctcctatctgggcagcactcttcaccagcaaaggctgtccgtggtcttttgaaaagagatcttttttagttcatttcttaaaatccagtgctatatgagagccagtctgatcttttctaaatctgtactttcattttgggtagcgcctaaaagagacacagcagtccctgttcaacctcttttcgggaaaccaagagccttggctgcttattcatcccttctctgccgttttcaacaacaaaccccctttgatgaaagaccattctgagacaggctagagctggttccccttttatttctcctcttttccaagctcccctctgccacctcctgtatctcttccaaccttcctcccccaaagaaaaacaacaacaaaccaaactttgaaaaaacaagggaggcttgtccccattggtgaaatcccttgaaaggatgtcactgagaaagggtctctgtggccctctttttccgcaagcgttgggaggtctctgaggatctgacctggggagactggagcgctaattatacgcacagaagccattcattagttgccactagcaagaagacttggccaatgctcactcctctgaattcagaggttttgaaagaaccccaaactgagcctgcgactttcttcaatctttttttttttttaatatatatatatttctttcttctccagcctctctgttctcctctgttgcccacagcaacctcagcagttggtaccagcacagagtggagagggcaggccaggttacctcggtgtcaagcaatcattactgagcaattcaccagagcctcacaaagaaacagatttctctgaaaatctcccgatccaaaccacccccaatatttaaccagcaactccccaaccctacctttcctgagaggtccgtgttttctagtacctgagcagacagttatgagccactgcctccctgcctttttgaggcctttctttaccaacaatgctttgttaactctttaacacactttcctgatgttcacactttctgcctaccacacacacgtccagtagagacagacaagggggagaattaaatgattagccagcagctgcccatgaggaacaggcagtcaggccataggtttttcccttttccgctttaccatgagacagtgctttgtcaaaaggaagtgccaaagttgtcatggaaataaatcattagctagattgagctatctttaatttgggcgggagtctgccattaatatgtctaaatctcagtttacaaatgagcacttgatgacttgattcctgacacttattcttgtgattcttttgaatctcaattagtaagactttctttctcatagaatgccatacggcttcttggaacaaaggacaaacgggtagaatgcttgaaacagaccaaatcaaagattatgatttttttttctgaagggaagaaaaaaataaaattggaaaaataaaaataaggcttatcatgatatcctgccgtctgatttctaaaagtacagttcctttaggttctaaggactggcatgttctttgtgatatttgtcaatgacatgtgaaatgtgctctgagtaaaggcattttcttctgcaatgttcatttctatttcaatggtctgcctcagtacttttctttaattaatactgtttatgctcactgatgaataattcagagttgtacaagcaacagatgtcagcggattcaaaatgactttccctgaattatttattatttccaaaaaagtaacaggtttgttgaacaagtaattggcaacacagatgtagatcaaggtttgtcagcaggcaacaagtttcactactgtttccccttttgtgcatgttgataaccaggatggcattgtctaggagcgggggtctgcctgataccactgcttagggagtcattgacccatcctgttgctgacttggagagctggaaccttagttggtttccaggttgtctaacgatgaaacatgaatggaaattcatccaaaaatgtaattaatgaatgtaggcttgtaaatatctcgcagacagaatgacttaatacaggtgcccagaaagagggaacatctttgtttgcagggatatgttaagaatagagacctagaagaaaaataatttgacagatatgtaaaggtttatgtataagaatgttctctgcagtgctgtttatgacagaatttttgcaaggagacaactcaacgtccaacaatgaaagactggttagataaattctggtagatccaagcagtgaaatattatatcaccactgtaatgatatatatgtatttttgatctggaaaaatgtcaacatattaaataaaagatgatattaagtgagagagtctataaaccgatatggcttatttctgtaggaaaatacatgtatgtatttttttttgtaggcatagggaaaagtctagaaggaactaccccaaaatattaatagtggttatttaggggtagtaggatccagcatgacttttcttctgtctcacatattttgccatcattttcactgtaagtatgcttatgttatgaatctcagttaatacgactttctttctcatagaatgccatacctcttcttggaacaaagcacacatgggtagaaggctaagctgctgtaacaagagatccaacaacattgtgacttaaagaaataaatctcaggctgggtactgtggctcatgcctgtaatcccagcaatttgggaggctgaggtgggcggagcacctgacatcaggagttcgagaccagcctggccagcatggcaaaaccccatctctacaaaaaatacaaaaattagctgggcgcagtggtgcacgcctgtaaccccagctacttaggaggctgaggcaggagaatcccttgaacccaggaggcggaggttgcagtgcgctgagatcgtgccactgcacctccagcctaggcgacagagcgagacctggcctgccttgttatcttctaaagagccaagtctgggtgctgtcgtgagaaggaaacatgggtatggaagaggcacaacttgccgtctcaaggccctggtccaaaagtggcccatatcactcctgctcccagcccttagcagggacataggcacatggccatactccactgccagctgcaaagcaggctgggaacaaaatccttacaggcatttatgtgaccagcaatagctctgtgctatggagaaaagagaaaaggaattttgctgggacagctttcggtctctgctaaatttattgattgattttcaaattttttttagatatgaggtcttgctttgttgcccaggtaggtcttgaactcctgggctcaagcgattcccccaccttggcctcccaaagtgggattacaggcatgagctaccatgcccagctgctactaaatttattacccgtaaaataaaaataaaaataaatttaaaaaggaagttgagttttgattcgatgtcttcagagggcatttccttttggaattaatcatacagaagatgtatactctgaagcaatttgaagatttaaaaaaaaaaaaaggaaaggtataaaatgtggacactgccttccagggatttacagtctgattgagaaaccggaccaataacaattcgaagtagtatatgcaaaaggccagagagtgttcagataagtgcagaggagcaaattggctagggtcatggaataaggcttagataaattgaaaggcttgcaattctgctttgttgagctaccaggattacttgtacttttggaagaaataaaactatttgtgttttgtgacattttagggtagcgtgacctccccttacaacacagaggaactgaatcatattttcctactgactgactaacagtaatttaagactctaattggtcttccgttagctgtcatttattgtaattctttgtgaaatgcacatgatctttaacataaaatatcttggaagagctacaacttaaaggaaacttgacttgataatgtaaaaattatcttttaaataattttttaaatatatggttttaaagctttttaatatggttatcttgagtagggtatttctaggcttatttggaaggcaaaccaaaaagcatagagagttttttttcctcccttggatagaaatttttctgtctttaatagattaatggtaatcatataacacattacctccttcacaataagatcaaattttgcaaatcttttgccttgaatcagattcttcaactctggagtttaggttagtagaacccaaaaatatgttgttttatgcacaaagcctcgcaaagtcaagtggtagattttgacctcttctttaacctaccctgaatgtagtcccttaaaacatgatggaatccacatttggtatttccctgctatttcatgagatgcaacaaaatgtttcaagggagacagtaggaaccatttggtgctttggtgatcttttcaggaaaatctggtttcggaagccccataaggcgagaattattgcaaataaggcccagatttgaaaattgctgttttgcaaattgtgcttattctaggaataatgatttctacagctgggaagaactttaaaaattgggtgaaccagttgcctgctttgacagatgaggtactgcaatgcagagaggtcaagctagttgctggggtcacctagctcatttgtgacaaaactaggaaccgtgggtctgactcagtcctctgccctgccgccctgtaccacagtaggcctctctatattatgccgcttggtagtcacccaccttgcttcctaccatcaaaaggaacttctggtagaaactcctttcacagcctcctgatctgcaggagtgatgaatttagcctgggatgaactgggagtggcagagccatctttaaaccccaggtcctttctggatgctttgtttgcagaagagctgcagagatcatgagggacatttcttgattcatattaatcagaaactcatttggggcagaatttgaacttgtagccaattttataaggaagtttcacagctaaaacctctctgtgttgtaaaaggaggtcatactaccctaaaatgtcacaaaacattttacttcttccaaaagtacaagtaatcctggtatccagataaagaagttttaatttgtttttattggtttaccttgcctcagagttctgagtgttggattttcactgtgacaacaaaaataaaatatttcctgcttattgtaaagcggtcaaagagctgaaaagcaataccatcttttagaatgcatttcttacccttctttgatcaacattaagatgcgttgccactctggggtatgattctggtttgatcgttgcagtgttttggaaaatgtttgatggcctataggtttattgatttcaaagactgtaaatccatctgcccatctatccatcattcaccctcctatctgagagcagtgtgggaagcttctactgaagtaccaataacttggattggtagccttcaagccctggggggacttggtaattccacacttaagtttttctacctgaaaaacatatagctcttaaatttcaaaatacagcttcgtttatgcctgaagaggagaagtttcataacgcagccagcactgttggttgtcatgcaataaccattctcccttcacccttgctaacgttttctttctttttttttttttttttgaggtggagttttgctcttgttgcccaggctggagtgccgtggcatgatcttggctcactgcaacctccacctcccaggttcaagcgattctcctgcctcagcctcccaagtagctggcattacaggcatgtaccaccatgcctggcttattttgtatttttagtagagacggggtttctccatgttggttaggctggtctcgaactccccacctcagatgatccgcctgccttggcctcccaaattactgggattacaggggcgagcctccacacccagcctgttaataacgcttttcttcattccattttcttgcctgtgagatgtgcataagacccagctcagagagttgttgttggttcctactctctaactttgcctaattagatttctgttaagcttgagatcatttatagccaactttttccatattaaaatcataagcctctgttgaaaggttttgttagtccaaattggaaccgtcttgacttcgcatcaaatcattcatctctagctcagtcgccacataagcttgtataattctctcagggcttctgtcattgttaatttacatctgaccttgttctgaaaactatttaaggcagtggagccctaacttagaacttgctggcttttaactttgccagttggtctggacctgtgaaaatatttatccaatcccctaagaaatcagagtaaagattttcatgaaaacttctagccgggcacagtggctcatgcctgtaatctcagcactttgggaggccgaggtgggcggatcacttgaggtcaggagttcgagaccagcctggtcaacatggtgaaacctagactctactaaaaatacaaaaattagccaggtgtgatggtgtgtgcctgtaatatcagctactttggaggctgaggtaggggaatcgcttgaacccgggacatggaggttgcagtgagctgagatcatgctactgcactccagcctgggtgacagagcgagactccatctcaaaaaaaaaacttccaaaaccatttttacatattggtttattttgactcttgatcgttgtgccaagaaagttgattatgactagcgtttccatcttacaaatagggaaatggaaaactcagaaaggtcaagtgacttccctgaggttggtaaggagtggtagagccaggatttgaacctgggcagtgtagccacagggtcctcactcttaaccacttggctaaactgtcttcatatacgtatgtatgcatgtgtttggttcccggtggtgatgccatggggagcatttaccatgagcgcagtgggaaaagcatggagcatgctggaaggcatggatgcttacattttcattccggatttgtggattttgcactagggtatctgctaggccatgaactagaattgtgtactgagagtcatcattagttgggtgatttttttttttttttttttttgacataggcactgctctgtcgcccaggcagtggtgtgatcttggctcacagcaacctccgcctcctggattcaggcgattctcctacctcagcctcctgagtagctgggattacaggcactcaccaccacccctggctaatttttgtatttttagtagagatggggtctcaccatgttggccaagctggtctctatccacccacctcagcctcccaaagtgctgggattactggtctcagccgccgcacccggccaattagttagatctttctacggaagaacaactgacttgccaatttagtctgtaagatcaggagttgagggacattggaactacagaaaaacattattaaagatgactcttaagatgtcaagaggaaagaaaaatgacttcttcggtcaaaaaaagagcaaaagctatcacgctgtatgagccacaagctgaaggctgtcttctgggggcggcttaaatgcattagattagtctgcaatgtggattaagggaccgtgggatttaataacttgcgtattaaagaatggctctgcaaatgttaccctaacataaaaatgtaagcattctaattgaatttagaagcaatagtattaaaatttcttctggtgatgctccttagacgcattaaataaaatatcaaaagtcacaattgattaaactgaaactttagcatgagagttattaagcattaaattctgctgctagaggtttttattttattttttcctgacatgtactcagaaaattctccctttacataatttatggtcattctgctgtttaaatgtgccaaaaaatgttctcggagttttggcagtgttttgaaatagagtatattatcttagtcttgggctatatatatataatgaacactcaatatatattgatggtggtgttttcatgagttgaagtctcgctgtgggcaaaggaaggaataggctattctattacatctgatgcttagcctgcctttaatgagtaatgtagaaaaatagacctcttcttcctcctatggcaagtctgtatgtagtcttgctaagcttgtgtctgcccacaaatcctaatgagaagatggcattgatcggagatggtagcaaagtacagctgggatactgctgtccatatgttccatggttccagaattccaaggactacagacagccttgtagaaatcacaaagcatgagtgatagttataagcaaagaggtcttctcctttttatccaaggacaagcaaatggcagggaggcagaaaggtgacgttttgaatctgtagacacataacgaggaatgtggttgactgaaaagtgtctatgcatttagggcggtgagagcagacagttaggggcatccaggaaacctcctcctctcttgcctttcagggtgtctcctggagtcccgagtgtggcatgttctgcattcaagagtattgtggaggccagacgtggtgaaaccccatctctactaaaaatacaaaaattagctgagcgtggtggtgcatgtctgtaatcccagctacttgggaggctgaggcaggagaatcacttgaacctgggaggcggaggttgcagtgagctgagactgcaccaccgcactccagcctgggcaacagagcaagactctgtctaaaaaaaaaagagtactgtggaattcattcttatgtagctgtatgaaaaagaaaaccaacatcataaaatatgagtactagtttgaagtccattacagacaaatcacaccatttttatgttagaccaccccaaccacttcccttttttgtttttgtttattttgacaggttctcgctttgtcacccaggcggaagtgtagtggcacgatctcagctcactgcaacctctgcctcccaggttcaagcaattctcttgccacagcctcctgattagctgggattataggcactcaccaccacaccagggtaatttttgtatttttagtagaggtggggcttcaccatgttgaccaggctgatctcgaactcctggcctcaaacgatccacccacctcggcctcccaaagtgctgggattacaggcatgagccaccacacccagcctcctttttgttattgctcagatttacagaaatttattttgcaaaattttacctcgaagaaacaagcgagtgtttctctgtatccatctgagctcaggaggatgcccaagtgaaaggtgtttaatccaacttctgttgaatgattgacttctcagggactgttaatttgtaaactctaagaaagggggaaagtttaagtttttccggctgccaaactttgggcttcatggtgaatcatcaggacaggctttctaggccaagtgtaagcgctgttctgggggccactggtctgagggtgggggagcaggatgtgtttatttagatgcacggccagagttcacacacttggggtttgggatcagcctccagggcctaagtaatttctcccaggagatgtcttcgcatcttataccctgtataggatcatcacggactgctgattgaagaaaagggttaggaccactgatcagagagaagctacgattttttcttttctgtctgtcacagaggtgtcagtaaaggagaaagcttacttgaaaggtttggattaccgagcagctcaaaagagctgttgctggcgggattttctccttgctgaagtttttctttgcccctagaatactaagcaaaaaggaaagaaaagatgaaaggtaagtccctctttaaaaatacattgagtcaacccatcgcagaaaaatacagatttctcaactgacaaataagcggcatcactgcatttgggaatcagaaaaagtccccacgataaagttatttgggaattaatcaacacttggctcatcctaggcgtggagcgcttcggaattcacctcgtgttgcttggaagctggcagcccggttgttatataatgtgaacccagaggcctgccagacggccctccctgtgccccgggggagttacaaggctctgtaactcttggagtcagtcaatcctgcagaacagagtccaggggcctggtgtgtgctgtgttttacagatgacacattaacctttgaaattctgtcctcagtcaccttcatcaatgcctgagcgaacgaaggaagggccacatgtgggctctttttttgttcacttttccaaatggagataagacatgtaacaaaatttaccatcttaaccatttttaaatgtacagttctgtgttattaagtgcattcctatcgttgtaccagtatcaccactatccatctgcagaactctgcatcttgaaactctgtgcctgttcagtggtaactgcctgttcccctcctggcagcccctggcagccgcccgtctctgaatttcagagccactttctgtccctgagtttgactactctaggtactcacataagtagaatcacactgtatttgtccttgtgtatctatctggcttatttctcttagcgtaatatcctcaaggtgcatctgtgtggtagtgtgtatcagaatttccttccttttcaggagtgaataatattccattgtacggatataccatgttttgttcatccatccatccctccgtggatggacatgggttgtttccaccttttgactattgtgaatagtactgccatgaacacagttatacaaatacctgtttgagcctctgctttctgttctttggggtactttcccagaattggaattgatgggtcatacggtaacagactccttttttaaaaaagaaaagtatcttgagaacttgggagagccaccctaggagtacttactgggctggattgtttgctccgtctccttttgcctccaggtacagcccataggcctctgtcctcacagatgtggtatggaagagtggccctgttccagggtgagatcaccagtgtagaccttctcagtttgaccctacatctgatgaacccccaaaagcacagagaggatctcagaatgaactaaagatcatgggctataaatgactccttccttctccttttcttccttggatgacaaagattgtggtcactatacagttatggtggcctcaagtctggtaaatcaatgatgtttcatgttagctgctcacgggattcaccttgtggcttattgatgtccagaccccgcctctgatcccgcctctagagattctgatttcattggtttgagtcctggcctcagcatggggacttttgaaagcttccaggcgagtctaatatgcagccagggttctgtagcacccaagtgaattactgaacccgaaccttttctcaatccctttcatgctgtctgttgtctttttggttatttcttttttctttttcttttttaatttgagatggagtctcgctctgtcccaggctagagtgcagtgataggatcttggctcactgaaacctcttcctgccaggttctagcaatcctcccaccttagcctcccgagtagctggtattacaggtgtgcaccaccacgcccggctaatttttgtatttttagtagagacggggtttcaccatgttggccaggctggtctcgaacctcaagtgatccatccccctcggtctcccaaaatgctgggattgcaggcgtgagccaccacacccagccaggttatttctttggagcatatcttcagatttgtacatctcagcccaaggtttaaagatttggaaacaggcttttctgtgtgtgtgtgtgtgtgtgtgtgtgtgtgtgtgtgtgtgtgtgtgtgttttaattaacgaggatgcattatgtaactttggagctaagaatgaggaatgaggatgcattatgtaactttggagctaagaatgaggagacctgggtcatacttgtgtgtgtgtgtgtgttattatctaaccagggataatgaattatttaacttggcaggatctcagtttgttgttgttggttttttgttttttgttttgtttttttttaaatcttggctttaaaattagggcatagattggcaaaccagataaaagaatgaaattaatgatttttttaaaaatgtcccctctagctctgacataccacgactctgaatgaacaggtggaattgatggggagtgaggaggcttggagagagagcccccgggtgtgaacccatcctgttctaacaataatgagctttgggatgaagagcctccccgcaggcaggggactgctgggagtttctggtgtcccagaagaagccttcagggcagctctgatcagtaaataaaaggatacgaaataaaaatctcaaaggatccgtaatgaataagaaagcaggaatgtcgtccccagggagaaatgagttgggggctttgtcagtcacgagagaacatagcacaggactctgggtccaatggagctgaacgtcagcgcctctgtccccacgaaaatagtaacttccctgacaccatccacctgatgccaagagctgtttatatcaacatttcttctcgggattctttcaaactttatacttacttctctcctcctctgattctattcaaggaatgtgaatggctgaggttttgttttgttttgttttcctctctagattagcacagctaatacagtggaattgtgatgccagggtctattagtgtagagaaacaaagaatgcagtcctgccctgggcaccagggtttacttccatggtgacttcttcttaagcccatgggaaagtgagagggaggtgacctcctcacagtcggctcagcctctggagcccggagccggagccagccccatagtgtgtggccatcaggatgacgcagagaggcgtgtgaacgcagccggccactgcagctggtgcacttgactctgggcagcgcgttcccaggaacccgcaggacactgaggaccgtgcgtgatgtaacccagatctgccagatgtgggagccagcatgagtcacaatgccgggccgttcattaagaaatgctttctgggtcatctgggtgcagggcactgctgcttccctgctgtccagggttggaggcatcaagtctgcccaccaggaatccccaagttcatgaacatctgtctaaaattatagcctggttttctgagctgatgtggcacagagcacacgcacgctgatggtctctggcttgtaatttgttaaaggatctcaccactttggttagtggtgggaaatcagataataaaaacatacgcccaggtgggagggtcacttgaggccaggagtctaagaccagctccagcaacatagtaagactccgtttctgcaaaaagataaaattacctgggcatggcatgcctgtagtcctagctacttgggaggttgaggtgggaagatggcctgagcccaggaattcaaggctgcggtgagctgtgatcacactactgcctccagcctgggtgacagagtgagaccctgcctcaaaacaacgacaaaaccaaaaaccaaaaaccccaaaagtgtaagttgctgtgaggtttctgcacattttagtaagatcagaaatgaggtggggtgttgggagaagccaaaaactgtgctggcattgtgccagtgaaatgccagcaatcacgagcggtcttcctttttttttcttttttttttaaaaaaaaaaagatgtgcaagatgccttatggtgaataacaagtatatttctgagaagttgtaaactaactccttaaaaaaaatccttatggatataagacatacagtcagaaaagttcatgcatgcatccctgggtaaaatctgacacccaagtaactgtagcaagttgaagggtggccccttaaatatcccccagagcctgtgaatatgatcttatttggaaggagacctttgcagacataattcaatcaaggatcttgagatgagatcattctggattacctaagtggaccctaaatccaatgacaagtgtccttacaagagacagaagaggagaagacacagacacacaggaaggaaacatatgaagcaggaggcagggattagagcactggagctgcaaggaacagctgagccaccagaaaccaaaagaggcaacaaacgggtggtcccctcgtgcctttggagggagcctggccctgctgacaccttgatttcttttttctggcatccagaactgtgagccagtaaactctgttgtgtgaagccaccaagtttgtggtgatttgataaggaaactaataaaatcatcacacctagatgaagaagcagaatgtttccaaaaccctggaaactccccctcaagcctagtttctgttttcacaccgccccaggacagctactgtcctgatttctaacgccggggataggttttatgccatttgaacataataaatggaatcttacggtgcatcgtcttctgtgtcagatttcttcccctccacgctttgtgagatgtgtttatcctgttgtgtgtttgatgattctcactgctgcttagttgtagtgttccacggtgtgaatataccacgatttatttactcttctcctgttgggggcatttgagtttggggctacgacaaagagtgctgttacaaattctgtttcgttcctttctgatgaatatacgtgggcgcttttgtgagttacattctcaggagctgaattgttgggtcataggctatctgtgtgttcagcttcagtagctattgccagttttcctattaattttttaaacaccccatccgatttggaatctctgtgtgaaatggagaatccaatggtagattcagtaaccactctttaatgtggctattttataaggtccaaatgttgaacgcagggttttcttggagcaagttccttccttagatcacaatcaggaatattccatgtctcagaagagcccattacagggctgggcaggcgtgaaagcacaccagtttctgggaatcggagaggctgggctactgactgtgaattttaaatattcttaacccatcgctggagtgatgaatagcacagctgtcgtatcctccatctcgagactcagaaataaatttgcagtcttttaggagctccagttttaattctcctttccagcttttaagctctatgctccataacttaggatgcaaccaaatgatatgcagcatttctaaatattctgctttgataagtgagtggaaatagtgctggtacagcggataagactagattaaaacccagggtccccagctgtctaaagaagatgtgctgctttggatttgcctgatgccccaagatctttctggaaatgggggagggtggctttgaccttggaaatactggaaaggggaggaaagtgtggtgatggtacctcagaggactgttttccctccagacgtgagatgggtgggatggtagcaacctagctatcattatgactgataagccttctttttcccaatacaaaagcaatttgtcttccttgcagaatgagaaaaattcaggtccaccagaaaataaccacaaacctgacacccacagttaaccactgttgaatatatttgcatatatacatttcatatacaaacctttcttcccatacaaacattttatttctgcagtcaacgagtatgtattgaatgcctgccatgtgccagtccccagggatagagcatgaataaaacagacaaaccatcccctgtccttgcggagctgaccttccagtgggagcttattatacgatacatatggtactaaaatgagatcttatggtacatgtttcttatcggttgcttttttccactaacaatatgtgtaacctctttctttctttctttctttctttttctttctttctttctttctttctttctttttgagacgtagtcttgctctgttactcagactggagtgcagtggcgcaatcttgactcactgcaacctctacctcctgggttcaagcaattctctgcctcagcctcccgagtacctgtgattccaggcacctgctaccacgtctggctaatttttgtttttttaatagagacagggtttcaccatcttggccaggctggtcttgaactcctgtcctcgtgatccacccgcctcggcctcccaaagtgctgggattacaggcatgagccaccgtgcccagccctgtaacctctttcaatggcaacagatattcagatataacttttatagatttatcaatgaactaaatccccagtggttttgcttgctggtggtggccagcacattcggagatggtgactgctctgatagtacaggtcccagagtgccaaaaggaccagggtgctgccattgacttgcagaagcaagaagtaggctgggtgcagtggctcacgcctgtaatccccaggaatttgggaggctgaggtgagcagattgcttgagtccaggagttcaagaccagcctgggcaacatggcaaaacaccatctctacaaaaaatacaaaaattagtcggacgtggtgctgcatgcccgtggtcccagctactcagggaagctgaggcaggaggatcatttgagcccagggggtcaaggctgcagtgagctgtgactgtgtcactgaacttcagcctgggtgacggggagacctcgtctcaaactggcaaaaaaaaacagcaacaacaacaagtagaagtaaactttggcaatattgagccatggagttgtttttttttttgttttttttttttttttttttttgagacggagtctggctctgtcgcccaggctggagtgcagtggcgctatctcggctcactgcaagctccgcctcccgggttcacgccattctcctgcctcagcctcccgagtagctggggctacaggcgctcgccaccaggcccggctaatttttttgtattttttagtagagatggggtttcatcatgttagccaggatggtctagatctccttacctcatgatccgtccgcctcagcctcccaaagcgttgggattacaggcatgagccaccgcgcccggcctctgagccacggagatcttttttaaaaaaacttttattttaggttcaggggtacatgtgcaggtttgttatacaggtaaactcatgtcatgggggtttgttgtacagattatttcatcacccacttactaggcctagtagccagtagatacgttttctgatcctctccttcctcccactctccaccatcaagcaggcccccaatgtctgttgttcccctctttgtgtccgtgtgttctcatcatttagctcccacttgtaagtgagaatatgcagtatttggttttctgttcctgcattagtttgctaaggataatggcctacagctccatccatgttcttgcaaaggacgtgatctcaattcctttttgtggctgtatagtattccatgagctgtggagatgttgaggttctttgttaccaagcattaactggccagtcctgaccaatacagctatggtcataacatataaagcaccttaagggaagaggacgtttagctaactctatgatgttgtcacgctgacatgaatagagagggttttgttttttaagccaaagacgttaatccattaattggcatttaaaaggtagaaatgccattggatgtaggaaagttcatctgtatttgaccattttttatttatttttgactctttatgcttataattttggaaattccaaaatacaaaggagtttttggtgatgctgggaattgaattctgaggagaaaatgttgttggaattatagagagtgcttttggaatactaccaagcatagtacttgaccttagaggaaaaaatgctggggagcacaacttaagatgggaaaaaagaacaagtttttaaaatatcatccctctaacgaatgcttccgtgatggaaacactcccctttccctgttatcgttcttcatttcctcctactctttactttaactacaagttcttgtatgcggttattcccccatgtaaattacatgaaaaatagttttagtcttctaactacattatccaatatgcagctttttaactagttccaagaggcatttgaggcccatgcgtggctccctttgagttgagtcatctaaaggttattgctcgtcttagtaaaacctgtgctgtgttgagtgcaccggtgacgacaatgaccccagtcttgagtcccagcctccccgtgtttactatggaattatcacagttccactcttgagaaatatggaaagcactcactgttcactctggtttaaccctcctgagagcaggaggtatgattaatcctggaaataatgggttcactctgtgggagcgcttcagtgattttcaaccccagactcatacatggtgattgaaaagaactagtgtgatcacagaaggttagcagaattatttctacttagaatagaaatgagaaggttgagggtcgtaatttcaaaaatggaaaagtaggttttaaaaattcaaatgtaatacataaatattccaaatatatttagagcgagaagccttctttccgccctcccaattctgcccttctctgcagagcttaccatagtttaaaaaaaaaaaaaagtgctgttttatccttttggaccctatactgtgcatttataaatgtgagaaaaccaggcatggtggtgtgtgcctgtggtcccagctactcgggaggctgaggtgggaggatcgtttgaacccaggagttcaaggctgtttttagctatgactgttccggtgaatagccactgcactccagcctgggcaacacagtaagagcctgacgttaaaaataattaacatgagaataaaacttatctatgttttttgtttttacataagtagtcacacaagacatattattataaacctccttttttttttttttgagacggcgtctcattcagtcgcccaggctggagtgcaatggcgcaatcgtggctcactgcaacctccgattccccagcctcagcctcccgagtagctgggattaaagcttaatttataatggaagtcaccctgtgcaggcacacttataggtactgtattctttggagcagtagctcattaaattgataaataaaactttattttcttaatgatggacatttaggaagtcgtctttttttttttctattacaagtaagataaacctgtgtctccataaacttgttcgtgtcttttttttttttttttttttgagatggggtctctgttgcccaagctggagtgcagtgatgtcatcatggctcactgcagtctcgacctcctaggctcaagcgaacctcccatctcatcctcctgaataggtgggaccacacgtgtgagccaccacgcccagctaatttttgtattttttgtagagacatggtttcgctatgttttccaggctggtcttgaactcctgcactcaagcagtctgcctgcctcggcctcccaaagtgctgggattacaagcgtgagccaccatgcccagcctgtttaggtttttgtgcacttgtgtatttttctttcttttttttttttttcaagatggagtctcactctgttgcccaggctggagtgcagtggttcaatcttggctcactacaaccttcattttccaggctcaagtgatcctcccacctcagcctcctgagtagctgggaccacaggcatgcgccaccaggcctggctaattttttgtatttttggaagagacggggtttggagttttcaccatgttagccaggctggtcttgaactcctgagctcaagtgatccacccacctgagcctcccaaagtgctaggattacaggcgtgggccactgcgcttggcctctatcttatgtttattatccatgtgtatatcatcttcagaaactggctccctcatatctcttgcttattatttccttttgggttatctttttaattaatttaggaactctttatatattagcaatattaatctttaatattggccggacatggtggctcaggcctgtaatcccagcactttgggaggccgaggcgggcagatcatctgcagtcaggagttcaagaaaatactccattgtatgtatataccatattttctgtatgcattcacctattcatgaacatttaggttgtctccaacccttggctcttgtgaataatgctgcaatgaacttgggtgtgcaaatatctctttgaggtcttgttttcaactcttttgggtatataaccagtagtggtattgctggatcatgtggtagttccagttttaattttgttaggaagcttcgtattgttctccatagcggctgtgctacttgacaagctcatcaatggtgtgcaatgattccagtttctctacgtccttgccaacacttgttattttctgttattttgatagtggccttcctaacgagtgtgaggtgatatcccattgtggttttgatttgcatttccttgatgattagtggtgttgaatatcatttcatatactcatgtactcactagtcacttgtgtatcttctttgtttttttttttgtttgtttttgtttttttttttgagatggagtcttgctctgctgcccaggctggaatgcagtagcacgatcacggcttattgcaacctctgcctcccaggttcaagcgattctgttgcctcagcctccagagtagctgggcttacaggcacccgccaccatgcctggctaatttttttgtatttttaacagagacagagtttcaccatgttagccaggctggtctcgaactcctgacctccagtgatctgcctgcctcagcctctcaaagtgctgggattatgggcatgagccacgtgcccagcccgtatatcttctttgaagaaatatctattcaagtcctttgcccgtttttatttattttgagaagcagagtctcgctctgttgcccatgttggagtgcaatggtgtgatctcagctcactgcaaccttcacctcctgggctcaagtgatcctgccaccttagcctcctgagtaggtgggactacaggcaagtgccaccatgcccgtgtaatttttttatttttttgtagagacaggggtctcaccatgttgcccaggctggtcttgaactcctgggctcaagcaatccaccctccttggcctcccaaagtgctgggattataggcatgagccactgtgcccggccagcctgaggaatcttaggaaacaaagtaaagaccttggcctgaatagctggtctgctacctccctacttcctactgcccagaggcaattacagtcatgcaccatataacaatatttcagtcaaggaaagatcgcatatatgatggtggtcttatgagattataatgctgtatttttactgtaccttttctgtgtttagatacacatacacttatagttatgttacagttgcctacagcattcagtacaatagcatgcttttcaggtttgtagtgtagaagcaacataggtgcgtagtaggctacaccatctaggtttgtgtaagaacattctatgatgtttgcacgacagaatcatttcacacatttctcagaacatatccccatcgttaagcaatgcatgactgtacatctgttcttagttcttccattggtgagcctccatcgttttaaataaatgcatatactgtatgctctttctcaatgtatcagttttagaattatccatcttctccccttgaatatataagtaggctgcagaggatttagtttgcttgtactgcttctcagcttatcttcttctgatggttaatcattttaaacaattagttttagttctcttagctacctctagttattgcatttctgtctctgtttcttgttttgtcagttttcggcaatattctctttcctttctaaataaaacattaaggccttaccctttcatttttctcccttttacgttgtccaaattctggataaatgaatatggtatatccataaatgggctattatctggtaataaaaaggtatgaaattctgatatatgctacaacatggatggaccatgaaaacatcatacccaagtgaaagaagccagacacaacgagccacatattacatgattccatttatatgaaatatccaggataggcacagaaagttgatgagtcattgccaggggcctcgaggaataccattaactgcttatgggcaccaggtttctttttaggataaggaaaatgttctgaaattagatagtggtaatggttgtaacaacctcatgaatatactaaaacccactgtattctacactttaaaaggacaaattttatggtttgaattatatctcaatttttttttaagatttttttttttttttaattgagagaaggtctcactctgtcagccaggctggagtacagtggcacaatcacggatcatggcccatggctcacggctcactgaagcctcaaactcctgggctcaagtgatcctcccacctcagcctcccgagtagctgggaccgcaggcgcgcacaccaccacacttgacaaaattttttttttttttaagtggagacaggggtctctctatattgcccaggctggtctcaaactcctgggctcaagcagtcctcccatctctgcctcccaaagtgctggaattaaagacgtgagccactgcacctggccaaaagaaagattcttaactgttacattccatttattccattttctaatcttaatatctttagcttatttctgaatgttggacaccagtaaacaacatttattgtcgctgtgtaaacattgcccactgcaggtctaggtgctaatgtcatattattactttctctataggaccaatgccacaatccacaggccacctagaggatagcatttcatgcatcgcagttcgagtgaattctcttttcttatttaccatcgactattccttttgtgttatcctggaattccttcttgctttctttttcatatagaccccaaaaatacactttcatcacctagtgctgtagatgcactccgggttatatgacatctccttacttctcagccatcgtcatctggctccaatctaccagcctgtcctgtctccttcgctgccttgtctcaacattttattaaatttatttcttcctcttttttgttccattcccttattttgcaaccttttggatgttaccctttggaagttaccctcttgtaacttccacattaaaagtttgggggctggctgggtgcggtggctcacgcctgtaattccagcaatttgagaggccaaggcgggcagattgcctgaggtcaggagttcaagaccagcctggccaacatggtgaaatcctgtctctactaaaaatacaaaaatgagccgggatgtggtggtgggagcctgtaatcccagctacttgggaggctgaagcaggagaattgctcgaacgtgggaggtggaggttgcagtgagccaagactgtgccattgcactccagcctgggcaacaagagcaaaactctgtctcaaaaaaaaaaaaaagtttgagggaagtaagctttctaaattctagcatgcctgaaattctcgtcattttggtcttctgctttgtcggtgcctcagtttcctcatctgtacaagggaggtgatcataattacactgacctattagtgagtattaaattaacgaggattaaatgagctattgtgcagaaagtcttaagacaacttttggtacatcataaatttgtttgggaggcgttaaccattcacgttgtagttgaagcacattagatgtgtcttcgtgttctgcactctgaagacatcgtgtggactaacagcaaagtaataagatgaaagtttgtgtggtgaagtaaacgatcctattaccatagttgaaccatagcttatgaattattccttagtgctcttctctgctttcataaaatcataatccgtgttttaagatttacttgtactttttttttttttaggccactaggctgttctcagctctctagatactcagcaaagcacagtcatttccaggaaatggattgaaattgtaatgcagatttggtttagatgtatgcaagtggctttggagagtaacaatgcaatctacttaaggagattggaaaatttaggatattgaagatttaaggaacgggttggcccaagtaacaaaaccattgccctagtcaatctatagtggccacttggaacactggatggaagaggattgggggcagcattggggctgttgtcagtaagtgacatctgccatggggtagaagggtttgtcattcctggccttaccttgatcctttctcatgaaggaagtacaagatattattgagaggatctgacagggagaattggtctagttttgggtacttgaggaagtttgtgtgaagtaagattattgcattgcattgcattgtattgtattgtattgtattgtattgtattgtattgtattgtattgtattgtattgtattttagagatggagtcttgctctgtcacccaggctggagtatagtggcgcgatcttggctcctctgcaacctccgcctcctgggttcaagcgattctcctgcctcagcctcccgagtagctgggattacaggtgcatgccaccactacgcccagctaatttttgtatttcagtagagacggggtctcaccatgttggccaggctggtctcgaactcatgacctcaggtgatccacccaccttggcctcccaaagtgctgggattacaggggtgagccacctcgcccaggctctatttctttttaaaggaagtggagatgtcaaagaaaacatatttgttgtgtagagttttagaaaataaagttaccaaaaactcaaaataaaagaagtagatttattgagaagtaagtctacaggttgtactgggggttggggtgggagtgctccaaggattatggctcctgaatttcccattgtaggactgggtaaaaggtggtaggaactagaaaaaaaatgatatcacttaatgaccactttgtctcataaatgagatgactaaagcttaaaaggtaaggtgactcactctgggtcacagagctggcaatagaatccagtggcctggttccatcttgacggggagggagggggcattgtttgttgcccaggtaccatgtcacactctgagtaacttctctgcagcccttgtattttctctgtaggggacaagggaaaacttaccctttgtttcttgaaacaaaggcaaattaataggggaaaagccatacaaatgattagcgtgcatgggaggaaaatcacaaagcgattacccagtatcctaatggggtacagatgtttatatatcttattttttagaggaaagggagaggggaagtgtggatgattttagggaggtagtagatgatttttagggaatttgatgggcctgaagaacatacaatggattgggacaaagtctgttgggcagacaatggtttgtgacaaaattctgtccaggtgtgttgactgaattcaggctttctttacgcgatatgagttcagttaatgaaaacacaggggagtgaccagaagtgattgtttccttctttggcatttctgtcttcctctttttttgttctattcccttattttgcaaccttttggatgttaccctttggaagttaccctcttgtaacttccacattaaaagtttgggggctggcagatagaaggaactccagagaacaacttgattctgtgctttgggagagacagagaaatgaggggtgtggaggaaggtcagagagaccctgaggcttctgcctcacttcagcatgtcaaagcaccctattttggggtattgctttctgagccccaacatctccagccttccaggagtctgtggcatatccttccccaaaggagtaggatcacttgaccactctactgaacctaagttgtttttcattttcttttgcatctgccttgaagtctagagcaaatgaaaatacaacaacactgtgtaaacaaaacacacaaaaaagctgctctgatctttctgttttctcaggtgcaaaacaggtcttatctaaagcaactgaaaaggcatggaggtagcaattgctttgctattccaggaactagtagccaccacatgtgtaaaactattgaagaacaagttttcaaccttctgctgtgaaaaggtacacaggaatggctaaagtctctctagaacccgtaccttcctggagcaaagggaagacctgggaaacgttttgacaaagcaatgcttacgatatttttcaatatcaggggaattcagtcagtcttctttcttttttgtttggccagtttagctaaagttttgtcaattttgttgatcctttcaaagagccaacttttggttttgttcagtttctctgttatttttctattctctagttcattagttaattaatttaggttaattaattaatttaggtttgacttgctttttttgttccgctgtcttcaggtggaaggttaagttattgatgcgaaatctttttcttttttaatatatgcatttacagctatacacttctctttaggtagcacagccttagctgtgtcacttaagttttggtatgttgtatcttcatttctaatcatctcaaattattttctactctcccttgtgatttcctcttaaacccattggttatttgtgtgtgttgtttaatttccacatatttataaattgcctgaatttctaattctattccattgttgtcggagaacttgccttgtatgagttcagtccttttaaatttactgaagtttgttttatggtctagtatacggtctatcctggagacttccacatgcactgaaaagagagtgtattctgctgtgttgagtgatgtgttctgttgattttttaggtctaattggcttataatgttcaagtcttctgtttccatgttgatcttctgcctagttgttctatccattattcaaagtggggcactaaggtctccaactatagttgtgatagtttagtttaattgtgcatttctcttaccaattctgtcaatttttgctttatgtatttcagggctctgttaggcacatacctgtttatcattgtatcttcctaaggaattaccctttgatcattataaaatgtcccactttatctctggtaccattttttgttttaaagtctactttgtctgatattagtacagccactccagctttcttatggtttactgtttacatgacatatttttcctgtcctttaattccagtctatttgtaactttggatctaaactatctcctatagacagcatatagttgggtcttttttttagtagagatggggttttaccgtgttagccaggctggtctcgatctcctgacctcatgatccacccaccttggcctcccaaagtgttgggattacagacgtgagccaccgcgcccagcccaagttgtttttgagaacacctgtagggagtgtttcctagcctttgcatgtgttacgcttgcacacagatgacagattggccatatgtaaaattttggagtaactctcttttccctcgcaattcttttgatggtgtttcttcgtatttttggcctccccctctacctggattgcactggagcctgctatcaagccttgtgagacgtgccttttgtccagttgttgatcctccattgttactccaccctttcctgccctcctgggcactgggcaagccttagtcccactcagtccctttcccttttctctccctcctccctcaaatcatcatgcttgggctggcgagatattacctagggctactgaaaagtcactttactatgggcaagcatataaatcatatttgtaactggcttttacctactgaaaaaatttcaatatattttaatgtgaagagacactgctgaagaaaaggaaatgaagaaaaggtgaagtaagattttacacacattttcagattagatgatactaatgttcctgaatatacaatctccctttagatttaagatattgtttttagtttagtttagttttgctttgtttttcaaatcactgccctaatcatgaatttcagtctttgggagaaggaatggccctcatggggtggggaaagcagtagttttttcaggtgtaactgacttttaattgacacaaatttacaaatttatattacacaagctgaaaacaatttttttctgtttaaataatgtatttgctatctgaatgatcatgtaaattcaggacaggatttgcctatttttattttattatactaataataaaaccccaattcaaatgacttttcagtacttactatacgcgatgtactgcgggtaaacaagaaaatttcttaaattctcattcaataattggaaatcgattaaattacacctatactaggagagattttatgcaaccattgataatttttgaagaatatttaaagatatgggaaatgctgataatatattcagttagaaaaagcacatttcaaagtaatatattcagtataattttcatcgtatctaaaaaaaattcaaaaccagaattcaaaactaggaagaatatgtacccaaatgttaacattgtctatttctggatttgtttttttaaaaaagtttccttattctaatttttctagaatgaaaacaaatcgatgctataatcagttgatagtatggtggtggtggtggtttcttgtaatgacatagacccactcgttaggattgccaggaatggacacattcatcccacttcaacgagtcactgtgacctcttagaaaaggtgggatagaggcagggccttgatggaagagtaaaatattcatagatgaatacatagaaagaatgactgagtcactgagcagagaagccacgctgagaatgtgtgcagaacagagcaggcaagcagtcagtaaccggggtggatgatgctgagactagggtgggtatgagtcaaggccgagtccgagagctgcaaaaacttgggagaggagttcagatgttgctgtgtacgttggagaaaatcattaaaggtttcagatttgcagtgagatttagatctgtctgggcacgcatggtggctcacacctgtaatcctagcactttgggaggtagaggtaggcggatcactttaggtcacaagttcgagaccagcctggtcaacatggtgaaaccccatctccactaaaaatacaaaaattagccaggcgtggtggcatgcatttataatcccagctactcgggaggctgaggcaggggaatcacctgaaccaggagatggaggtttcagtgcgctgggatcgtactgctgcactccagcctgggtgacagggcaagacttggtctcaaaaaaaaaaaaaaaaaaaaaaaaagagtagaactgtgttattgaaggctgggagaccaggggcaggagagcatttaggaggtgtgctcctggtttgttctttctcttactggtccttctcagtgtccttcctgggtttttcttccttcccctaccccttcactgttgttgctcctgggtactgtttagtgcccatcgctccatggcttcactgaccatctgagtgctgtggtcttctgaccctgagctgcaacctggatcgctttcctgggctgcaaaccaggatgtgtttaaacatgtccaggccacctagttgtccccggaatccttaacctcacaggaagttattttttccaaagcctgctcctcctccttctatatttaattcccaagagtaatctccgttctcccatcctaccagttacgcagccagaaaattgaatgtcctcatgaaatttgcaaagctgttaccagaaaggggccctgatccagaccccaagagagggttcttggatctcaaggaagaaagaattcaggtcgagtctacaaagtgaaagcaagtttattaagaaagtagagaataaaagaatggctactccataaacagagcagcctggagggctgctggttgcccagttttacggttatttcttaatgatgtgctaaacaaggggtgggttattcatgcctactcttttacaccatatagggtaacttcctgatgttgccatggcatttgtaaactgtcgtggctctggtgggagtgtagcagtgaggacgaccagaggtcactcctgtcgccatcttggttttggtgggttttacctgggttctctactgcaaacctgtttttttatgacctgtatctcacgccgaccttctgtctcatcctgtgacttagaatgccttaactctctgggaatgcagcccagtagatctcagcctcattttactcagcccctattcaagatggagttgctctggttcaaatgcctctgacaaaaagacaaatacttagctgaggtaccttcaagaggcaaattcatagagtcagaaggtagaatggtggttgccaggggccagaggggagggaaacggggagctgttgtttaaagagtgtagagtttcagtttgtggtgacggaacgttctagtgatggctgcacaacattgtggttgtacttaatgcaccaaactgaatacttaaaaatggttaaaatggtaaatttcatgttatgtatgttttaccataatttaaaaataaaaacaggccgggcttggtggctcacgtctgtaatcccagcactttgggaggccaaggcgggtggatcacatgaggtcaggagttcgagaccagcctgaccaacatggtgaaactccgtctctactaaaaatacaaaaattaaccgggtgtggtggtgcacgcctgtaatcccagctactcaggagcctgaggcaggagaatcacttgaactggggagatggaggttgcagtgagccaagatcacgccactgcactccagcctgggagacagagtgagattccgtctcaaaataaataaataaataaaataggccgggcgtggtggctcatgcctgtgagtactttggaaggccaaggcgggcggatcacgaggtcaggagttcaagactagcctggccaatatggtgaaaccccatctctactaaaaataaaataaaataaatagctgggtgtggtggtgcacgcctgtaatcccagccacttgggaggctgaggcagaagaatcgcttgaacccaggaggtggaggttgcagtgagccgagattgcaccaccacactccagcctgggcaacagagtgaggctccatctctaaattaaattaaattgaattaaaaataaataaataaataaataaataaataaataaataaataaaacgtgttcaaccgggtttgacttagtttttcctcagacttatttgactgtggtcccctctgatcagaagaaaaaaatgctttaaagtgtgacatatatcacatcctttccatgttagaaaaacacactttggggaacattcccacatacttgggggtggggaggaagaatcaacttcctgagtgtattaactcagagaaatattattagaaatggtggctgagtttttatttgggggaattttgggtcaattcgtcttctctgagcaagcctaatgacgtcatttctatgaatggatttggagctttgaaacactttagcctgaaaagaaacgtctagaacacagccggctcaaatcggagaccaattgacttcaatgagtcttaagtacacaatctgctgcctttatgcagaggtttgggaattattttggaaagataggaggttcctcctattgggaggcttccagtcagtatcttagatctctaagtgctgaaacacttgaagctgagcacagggcattgggtgagtaaagggaaagtgaaatagacagccttgggcaacacatttgtccttccttcctctgccccaggtcctagactaatctgggtctaaagcaggagttgcttaagagactcagcccacacagtggcttcactgtctttcactctgtctgcagatctgggaatcagagccccctctggcttctttggccaccatgtggcccactttcaggacaccccgaacctgccttgtcactaatccctgcgtccagagctgatgtgcgcacccctttccttctctccaagacccccattcctaacagcattcctgcccctctttagacccctgggctggcttttgctttggttgcctttctcagttccttcttcagaagcctctctaatgcctcaagcccttcactactcaagagggcgcccttgaccgcctcggcctcccaaagtgctgggattacaggcgtgagccaccgcgcctggccattttttttctttttgagacagagtcttgctctatcactcaggctggagtgcagtggtgcgatctcagctcactgcaatctctgcctccggggttcaagtgattctcctgcctcagcctccctagtagctgggattacaggcactcaccaccatgcccagctaatttttgtatttttagtagagcaacctctgttaccgcccttgtggataaagactcccgggtcccatcctcattctctcttccccactactcagggattggaatgctgccttgaaatttcagcattaggcccccttttccatgccagcgtattgtttcttctacttgaaaagtacatgttccttataaaaacttcaaacctcatagaagtatctttcccacaattatctcttaggtaattgccattaacaatggacaatatatttttttagatttttctttttctattcatatatgagtacacgcgtttgcattttagcaaaactcctgctatacctactgttttgcagcttactttccttcccccacataattatgcaactggggcatctttccatcttggcaaggagagctctatttcatgatttaatagctgtattgtatttcattgtttggatgtaccatgatttatctaacggatcccattgatggacaactggagtttttccagctttgttattgcatataatgtagacatgaataatcttaagcacataaatctttgcacaattgcaaaagggtttctctaggataaattcctaggtagagtagctaggtaaaatggtaagaacatctttaattttaatagacgttgccaaatcatcttcctaaaggacttaaccattttgttcttccaccacattgtggaccgaggtcggttcccttcacctcgtcaatactggctagctgttctttttctttttgagacagagtcttactctgtcactcaggctggagtgcagtggtgcgatctcagctcactgcaacctctgcctcctgagttcaagtgattctcctgcttcagcctcccgagtagctgggattacaggcactcaccaccacgcccagctaatttttgtatttttagtagagatgaggtttcagcatgttggccaagctggtctcgaactcctgacctcagatgatccacccacctcagcctcccaaagtgctgggattacaggcatgagccattgcacccagcctggctagctttttaaatttttaatactttgatagatgggaaatgttttagtttacattttaaacatttgttttgcaggtcttcccattgcaaaactctagggtgatactgattacttgaggttgaacattttcatatgttaattggccatttgtatttcttctctaaatttctgcctggtctcctgctgatgatgcacttgaatttcgcattgctgttctctgcctgccaggatggaaaatctattccttctcttcagacctgcccttccctgccccaaggctagagagtgatgtccagctcagaacttggggtgagaaagatccacgttgactcccaactactccactagtatgtgaccttagacctctctaggtcccagtttcttcaaatgaaaaccggatttgggggccgggtgcagtggctcacgcctgtaatcccagcactttgggaggcccaggcgggcggatcatttgaggtcaggagtttgaggccagcctgatcaaacagggtgaaaccccgtctctactaaaatacaaaaaaattagtcaggcgtgatgatgggtgcctgtaatcccagctactcgggaggctgaggcaggagaatcgcttgaacctgggaggcggaggttgcagtgagccgagatcgtgccactgcactctagcctgggcgacagagtgagactgtgtctcaaaaaaaaaaaaaaaaaaaaaaacagctggacttggagccggaagatcagaactgttaggctctatcctgtgttctcaggtaccctgaacttgcttttagagtatttatattttattatcattttttgtttatatatcgatttctcttattagactctaaactccttgatcacaaggaccgtattatccatcctcacatctttggtgtccaggatataatggtgttcactcaatattttccaatacatttaatttttgagaattttattgactttttttttttaccataagaaaagctgcgttctaggtgccatgagaatacaaaaaatatttaaaatgtagttcatatcttagttggggagataagctcgatcactcattcattgagttattcaatatatccggagttatctaagctccagccagcttggcagtatctgaaaagataaagtcaagttgtgtaccccacacttaagtggcttccagtctagtaggggagacagatataaaataaacacaacataatgggatgcacacaatcatatagaaatcatataataattattaaaaatatatagtaaggctgggcacagtggctcacgcctataatcccagcacttagggaggccgaggcagatggatcatctgaggtcaggagttggagaccagcctggtcaacaaggcgaaaccccatctctactaaaaatacaaaaattagccaggcatggcggcgggcgactgtaatcccagctactcgggaggctaaggcaagagagtagcttgaacccaggaggcaaaagcgagctgagatcccaccactgcactccagcctgggtgacacaggaagagtctgtatctatatctatatctatatctatatctatatctatatctatatctatatctacatctacatatgtgtgtatatatatgtatatacatatatgtatatatacatatactatatttttactatatgtgtgtgtgtgtatatatatatatatatatatatagtaaaaaataaataagtaaaaacagtcacagaagaattatcacaaagcagtgcatgacttggtagttgccaagtgggagtaaagctcactttgcacttaatgtgttctaggagtcactaagggcataggaagaagagacggctggaagggggcttcccagtgcaatcaatgagtggtcacgtgtgtgtcagtacagcaaagaccaagaaggcttgcaggaaaaacttgttgaattctctttgacctaatgtcacccacattcatttaactgtgaagctcttttcctcccactgcttagcatcctatggatctatcattctttaaaatcgttatgggaaattctggtgtagataccatttgtaattagatagtgtctcttaacctctttggaacataggccttttgagaaatggatggtcggaggggattgtgcacaattctgtgctcttcgaagcccaccgaagacccgcctccatgatcagggaaagcaaagaagggaaaaaaaaaaatcccaggtagtgggagtatctgtgtaggtcgagatagaagagggtagaagatacggagcttgttcactgccgggcagttgactgtgagggagagactgtgtggggagggggacaccaactgtggaagacctcaaatacttggactacttggtgtagaattcacgggttttttgtttttgtttttgtttttgttttgagatggagtctcgctctgtcttcgaggctggattgcagtggtgtgatcttggttcactgcaaactctgcctcccgggttcaagcagttcttccagcctcaacctccgagtagctgagattaccggcacccaccagcacgcccagctaatttttgtattttttagtagagatggggttttaccatgttggccaggctggtcttgaacccctgacctcaggtgatccgcctgcctcggcctcccaaagtgctgttacaggcgtgagccatcatgcctggccaaattcacggttcttgataactgatcaactgtgaaagtcaagggaagccgggtgcggtggcttatgcctgtaatcccagcactttgggaggctgaggcagacagatcacccgaggtccggagttcaagaccagcctggccaacatggtgaaaccccatctctactaaaaaatacaaaaaatagcccagcatggtggcatgtgcctgtagtcccagctactctggtggctgaggcacgagaatcgcttgaacctgggaagtggaggttgcagtgagtcgagattgtgccactgcactccagcctgggtgacagagcaagactcagctcaattaaaaaagaaaaaaagtcaagggagatgccccagtcaaagataactctgccaacagacactggagtcatagttaggattatttacagaaagaaaatcatggagctaaaacttcaacacttcaaaacctatgttatgatcatgttgaaatgccccacgttgcctttattaactagtgctcagtctcccaactgaaaactcattgtaagaattgaatttgccatctaaccgggcatcctaccttgaatggttaaaaatcagatttgtctgatttctaattttagaaggaaccaggctgaccttcattccgctgttgctaactggagccctgttacctgggtgactagatttacaatatgtcagtatgcaaataccatctgcccaagaggagaaaggaagcaaggccttcttcctctaggggttgtcagcagttctggaaacgtcttcctctgggaatggggaggaaggcatgcccaatagaaggagaacagggaagaagatgtgctgattcgtttctggagcctctcccttgttctcttcccacagaggagtttgtggtctgccttgtggacagtcctgaatgtatatcattaggatatagacaggaacttagattgtacatttctcctggtagagtgagcaaaagaagtagtatatatcacttcagtggatcacaaaacacttagattcagataactggaatggcttaatgaagactatgaatatgcgattcctgcctccccaaatgccattaggaatctaatttccaactgataagagagtgtgggctgggcgtggagccggctgcctttactggacgaactctgaaggaggatgaagagaagtggatattccggctcattttcctacacttgaggttgactgggcaagcggaagggatttttctcccacagaatatctatattcagcacttgtcctgagtattgtttcaggcgagggcttggaatcacatttggaaacattcaaatccaaaggcagggacgttctgctttccttttcatgaaataactgtcacatcagctgtcagctgcaggaatctctcccacccacgcattttgtgagtccaaattaggtggactaattaattgtaatttttactttcaagtctcaaggactttgatgggcggctgtgcttcctttcatggttgtgtgcaggaatttatgtaggaggaagaccttctaggagcaggattgaggatctcaggctcttggcttctgattttgtacccctgggttacttcccctgtgacctctcctctctttgctctccttggctctgctctctcatctctttggtaaaaaagaactcttcttaccatcaacctgaaactgtcagcaacatgcaggagtgagcagtcactaaacttaactgtgacattttcatccacctagcctttttatctgcatgtcaaacaagtggccaaggagattaatgcctgagtgcatgctgcagctagacgggctgggttcaagtcccagctctactacttactacctgggtgacattgggcaagtgacttaacctctgtgtatcagtttcctcatttgtcaaatagggatttaaaacgctaccttcctcattgtgttgttgtgaggattaaatagtataaatattttagaactgtgctgaacctatagaagccagggctctgtatggcagcttttaagatgactctgtcatgcatctgcaggggtcctagtgaggtagtgaagttttgctgtgagcaagtagatttccagagcttgcttgcaggcagtgacctccccgttctttcttgccatgctagtttcttttttgagatggagtctagctcagtcgcccaggctggagtgcagtagcgccatcttcactgcaatcacctcccaggttcaagcgattctcccgcctcagcctcccaagtagctgagattacaggcgcccgccaccacgcctggttaatttttgtatttttagtagagatggggtttttgccatgttggccaggctggtctcaaactcctgacctcaggtgatctgtctgccaaagcgctgagattacaggcataagccaccacgcccagccatgctagtttctattcatgcacagatcaagcctaattttccatgtggcaccccccaccaacaacagtaccccatgctgctctgttcctaccccttgcaccctttctgtcaatgctgtgtaattagcacatttggacacgatgtcttagcttctcactctgattgtaatgtgaagttcagctcttcattgtccttgaggcataatgaaaagatgccatgtggctggagagctgcctgcgatcgttgttcaatggatgatgtggccaagtacataaaacagtgacttggacaaccacacttgtcctttagcttactcttgaagtcacttattgctttcttattgcttatggctttcttgttgctttcttattgcttatggctttcttgttgctgtacataacttaaaactatcaaaagaaaatatgagatgttgcagctgctatggaggaaagtctgacagttcctcaaatggtcaaacatgttgttaccatgtgacccagtaattccatatccaagggaaatgaaaacatacgtcctcaaaagactcacccacaaatactcatagcagcattattcataatagccacaaggtggaaaccacccaaatgtccatcaactgatgaagggataaacaaaatgtggtatatccatacaatggaatattattcagtaataaaaaggaagtactgatgcatgctaaacatgaatgaatcttaaaaacatgttaaatgaaaggagtcagtgacaaaaggccatgtattgtatgattccattgatatgaatgttcagaatggccacatccatagaaacagaaggtaacttagtggttgctgggactgggaggagaagagaatcagggatgactattagtgggtatggagtttcttttggagatgatgaaaatgtggaattggatagcggtgatgatttcacaaccttgcaaatatactaaaagccaccgaattgcatattttttttaaaaaagtatgggaaacatctatatgctcaactacagagcttaaagtcatctttaagattactttttccagcgtagctgtcacctaaaatagaataaaaagtgacttgatctgcaaggaaaacatgaaaaatgcaaatggtcaagaatggctttttcaccccaaattgttgaatataaattatatacatgcaattcgtaagtaaacgctgtaggactcggctgccttctatgttgtgattctgtaatttgctacattcctggatgggccatcaaaataatactgaaaacagcttctataacaaatagaagtgctgtttcaggtcatgcctaccaccactcctgggttccctaaggtactaattcatagctacctctttgtggtgcccttacaaagagtgatttaactgtttgtaaaggtgtctggacctttttgacattaaagagatttactgaattaaacttatgtttgcaaacagaatatttccaggggatgccttccagccccctaagaattaaccatcttagtttatcagtgtttaatcaggaccctactgattgactcttctggtttaaataaataatggggttgaaatctctaccagggctgtttcagtacttatttggaagaaggatgtgaaatacccaagctccacctaaaataggctttgcaagaataagtgatccaagagagaacctacagttgactttaaaacatcctgtaatcatgtcacacctgttaggatggtggttatcaaaaaaacaaacaaacaaacaaaaaaaggaaaatgatgggccagccatggtggctcacacctgtaatcccaatactttgggaggctgaggcaggaggatcagttgagactagcctgggcaacattgcaagacccatctctacaattttttaaattacccaggcatagtgccgtgtgcctgtagtcccggctactccagatgctgaagtgggaggatcacttgagcccaggagtttgaggctgcagtgagctatttcacaccactgcactgtagcctgggtgacagagcaagaccctttccctaaaagtatttttaaatgtaaaacaagtgttggtggagatgtggagaaatcagagccctcctgcattgctggtagggatgtaaaactgtggaaaacagtttggtggttactcaaaaagttcaacatagaattaccaaatgattgagcaattccacttctaggtctgtactcaaagtaattaaaagcagagactcagattcttgtatactcatgttcacagcagcattctgtttttttttttttttttttttttgagatgatgtcttgctctgtttcccaggctggagtgcagtggcacgatctcagctcgctgcaacttccgcctcctgggttcaagcaattctcctccttcagcctcccaagtagctgggactacaggcgtgcaccaccacacctggctaatttttgtatttttagtagagatggggtttcaccatgttggccaggctgttctcgaactcctgacctcaagtaatcctcttgccttggcctcccaaagtgctgggattacagatgtgagacaccatgcccaggcagaagatagattttttttaaatgtagcaatttctggaaatataccaaacttactgttttccctgtcttcactgacgacctcaggagagcaggagttgacacccatttgctttcctcaatctgctatctgcttctttttaccaaggaggaaacactcttaggccaactatggcctaagaatgaatggtgcctccctgcaaccagccatacaccctctctggctacaagtgccatccatgcctctggaacctggagcttctcctaagtagggtgagcaaagatgctggaactttccaagtctcaatctacatatacaatccacatatataaccctctcccagccttgctaggtagttaccagaaccccaaaaccacttgccaagccagtcagcatttaggtaagcaaaggagtccagtgaccctcaaatatcactgagatcttgtttgtctaggcatgaagtgccttgaataactctttcaagacattaagaactcccgctgttcaattgtacctgaagcagcaagtgcttctctttgcatttcctttaccctctgttctcagaaggtctcaaagatgctgaaactaattgctgtcattcctgaaagatttctgcttttaagtggtactgcggcttcccttgatgctaccagccgttttcattaaggatttcatgaagggttgatgggtgcattaggcttcacaaacaacggttcttttcatcctggaaaggccttgctaccttggtagtggatggacctctctgctgcgaacatctctgtttatggggctaaggttacagagatgacaaagaggtcacaagcggatggcgcaggatatgtgtcctgggaaagctctatcttgattttccctctttttggtcttgtgattgactgtgggtttatgttctgtagtaaacacaagagccttgattgcttactaaaggtcagacttgtcagcaaacctctccattaacttgagttgcgatcggtttcacatttcctggcaaatcgtttgagagctctgatgaatgcatcagtttccttcagtcttctgtcttcaaggcagaaacgctcaagaaatccccctctttgccagacaccaagtgtatcttgtttgcagctctgcctctagcatctacagggcttggcatacacgtgaaatgcatgttgagtgatgaacgggagcgcacaggactcttaagaaccgagaccgtccccacagccaacgtatgaagaaatcccatgttctgcttctagagccaactgcccttgtggtttcgagttgagttctggcagttcctgtctttgctctcttaatcattcttcatgggctcccactaatggctaatttgctcagcttgtcatttataaatacaaggacatgacacccactgccttagccagtgcttataaagtaacctgtaagtgctgcatgttatcatctcggcttttcaatttatgagtcaagtgaattctcggggctagaacatcacccctaaaagcgagtcagtgttggaagaagcagcaaaaatatacatgcactcttacttgcatagactatgaagactattgttactctcctgtactcagtcaagtagattatgctcctccatggtcaagtacccttgaggcgatttgcacagttttgcagcaacagcaggatagaggttgtgctggtaccagcaggaagcatagcctgagcccttcccttggatttcagttgctctatttctattcagttcagtccagaacttaggacaggttaagcatcagcgtccaatacagtttatattagtttgtcacaaaagggggattttttgaattaaatgttgataacccagcttcttaaatctttttatcagttttttcattcccataccctggcataatgacacaggtattacgtaaacaagacacctccgagggctgcttataaaaactcaagagaaaagataaatatgtgatgatgcactgatatcctgaaatatgagctgcaggtttgtattttctttgtgggatcggatattggttttcatggtttattgaccaggctgagagacatctgacaaaacacccaagaactttacaccttttttttttgttattattttttaaccttcctgtctacatggagaaatctacacattgaatcacagggcctggaagactggggcttagccagtcatgttcttagcttgggcagaacccaaatcagatccagctgttggaggtaaaaatacacgctgctttcccaaggaaaaagcaattggaattggtctcactgtagagttactctcgggcagaacttcgggataaggagcaactggagacggtcgactgtgaatgtgatgttcatgtgacattcatgttcattgaggaatgtgttctcattgagaccggatcagaactcatttgggttcagttaatgactctttcctttctgccgggtctttgtctgcaacattgggcacgcagtcagtacctcgttgtgtgggagcatcaccgacaggaatcctccagaatggtcatatattaaagacctctcgggctgggcatggtgattcatgcctgtaatcccagtactttggaaggccgaggcaggtgcatcacctgaggtcaggagttcaagaccagcctggccaacatggtgaaaccctgtctctactaaaaatacaaaaattagccgggcgtggtggcacacgcttgtaattccagctactcaggaggttgaagcagaggaattgcttgaacccaggaggtggagattgcagtgcgccgagatcacaccactgcattccagcctgggagagagagtgaaactccatcccccaccaccaaaaaaaaaagacatctaggcttagggcacggcaaacaaagaactcccctggcatggcaggaatcagggaatctcatgtaacattcattgtttctccggggagtcttttcatatttctcccgtcttctaggctcaatacctttcaggaagcttctaaaccaaaggttcatcaaatagaaataattttaaaaattatttcataataaactttaataattttttcataatcataaagtaattgttagatggtttccttgaggcatgagccatactcactgaaaaatgacaagttctgagcctttttaattgtgatcaaatatacatatcataaaatttaccattttaatcttttttttttttttggaaaatgaggtctcacttgcttgcccaggctggagcacagtggtatgatcatagctcactgcattgcaccctggacctcctgggctcaagcgatcatcccgcctcagcctcccgagtagctgggactacaggcgtgtgccaccatgcccagctgagtttttatttttttgttttttgtagagacaccatctccctatgttgtccagggtggtcaccaactcttgggctcaagctgtcctcccacctcagcctcccaaagcactgggattacaggcatagactaccatgcctggcccactgtaaccaattttaagtgtatatttcagtgacattcagtacattcacattgttgcaaaaccatcatcaccatctacctccagaagcttttttaccatcctaaactgaaacgctgtaccctaaacactccattacccactctttccagtccctggcagctaccattcgactttctgtctctacgaacttgacacttctagctgcctcgtctaagtggaaattctcaagctttttataatacttatgggaagtagtcaatctgactaccgtctaatgaaatttttacataaggaaaagatagttttgagcagatggtcagatttcctttggttttggcattgtacaagtatatggcagatgcctcattctcttatactttctggaacccgcagcataacagggatatgaatgaaacagatctgcaagtcacagtcagacatgtggccaactagaaggagcagtggtgagggcagttggtgtacaggtttattatacaatttatgaagcattttaatttttaagtttttttttttttctcacttgattctcaccatgtcttgcgaggtattctattagttccattttaatgataataaactgtggctcagagaagtaaatcgtctaaggttacaaagctagtcaatggtagaatcaggacgctggcttcacattttcatttttaaaaccccagtgctttccatcacagcccactgtgaacaattatcacgtctctggaggcccaggtaatagccagtcctcaggaagggagggcctctccaaatgcaaccctaattactagtgctccacctcaccagctcagaaatacatggaaaccgtttttttttttttttttttttttaattgagacagagtctctgtcaccaggctggagcacagtggtgcaatctctgctcactgcaacctccgcctcccgggttcaagtgattctcctgcctcagcctcctgagtacctgggattacaggtgcctgccaccacgcccggctaatttttgtatttttagtagagatggggtttcaccatcttggccaggctagtcttgaactcctgacctcgtgatccaccctcctcggcctcccaaagtgctgggattgcaggcgtgagccactgcgcccagcctaaattttctaatagccacattttaaaaagtgtgtagaaagaaacacataggctggctcatggtagcttacacctataatcccaaaactttgtgaggctgtggcgggaggatggcttgaggctaggaatttgaggccagcctgggcaacatagcaagataccatctctacagaaaaaatacaaaacttagctggacgtggtggtgcctgcctgtagtcccagtgactcaagaggctgaggtggaaggatcgcttgagcactgggggtcaaggctgcaatgagctacggtcatacctctgcactccagcctggatgacagagcgagaccctgtctctaaaaaaataagaaagaaaaggaaaaaaaaaggcaagtgaagttaattttaaaaatatattttagttaacccagtatacaaaaatatcatttcaatcaacataaaaattattaatgaactattttgcttttttttgtagtaagtcttccaaatctagtgtgcattttagacttaaacagcactcccaagtcagacgctaaattttcattggcagtacttgatctttatttagatttcataaaattcccagttgaaaaagtagattcacatacccaaagtgtttcaaacatatatgaaggttttcttttttttttttttttttttttttttttttttgagacggagtctcgctctgtcgcccaggccggactgcggactgcagtggcgcaatctcggctcactgcaagctccgcttcccgggttcacgccattctcctgcctcagcctcccgagtagctgggactacaggcgcccgccaccgcgcccggctaattttttgtatttttagtagagacggggtttcaccttgttagccaggatggtctcgatctcctgacctcatgatccacccgcctcggcctcccaaagtgctgggattacaggcatgagccaccgcgcccggccgaaggttttctaataactgaatcaagcaccagtcttaaatttaaatgaattaaaatgaaagaaaatttaaaattcaatccctctattccatgggccacacttcaaaggctcagtggccacacatagcaaatagctttggtcctgggcagaacagatctagatgaacagctgagggtggcccagactggacccagccgtggaatagaacaacggtctgcaaacttatttctataaagggccagataataaatattttcagccttgggggttacacagtctctcaaagtattcaactctgccattgtaaatgaaagcagccatagaatgaatgagcatcgctgtgttccaataaaactttatttacaaagcaggcatcagcctgcatgctttgccaaccattagactagaacatttgtcctagggccttagctgtgctgtgggattaccagaaaaagagacagctctcacctctagctttctgagatgaggttgtcaaaatctggactcactggatctcctttcctgtgtgtaattagaattttgacaccacttggcatgaagcaacggtgggccagagttctgcgtcatttatccttcaggtgctctctgcagtggatggtttgtgcctcctgaagcaattgcttccctgtgctttgaggtccagcagaggtaacagcggagaaagctggaagaaaggcttcaacaaaagcattaatggtgatgtgaagaatgcaggaaactcccaagaaagccaaatgatatcactctctgcttttccaacatagccagtgtgaggcaggaatcacacacgtttcacagctgggtaaatatgtgatttcacgtgaaatcagagggacaggtgtttctctgtgcttgttaggtgatatggcgtccgcccattttgatggtaaaggccaaagtaaatataaattctgtttcctgacctggggccttgaggtccccaggcggggattaccaccacccaatttgggaatctacgttgcaaagccatggttcccgctgttcacattgtgacgtttggaaatggtattgggactaatggagggaaagaaagaggacaggaagggagggcatagagattggttggtaggaagatgacccccactaggtgctttagggtagggggttatggaggctggctttgcagaaactctgggacgcagcagttggggaagggtgaagtgaaaatcagtgatagcttagagctctgctgaccctagaactttggatccagtatttcttcaggcatggatgatgttgaaggtattgttggcactcatttgataatcccttactgtactcagaagttttggcttggggttgcctttttaattcaaggttcaagattaaatgacttggctgggtgtggtggctcatgcctataatcccagcactttgggaggctgaggcgggaggatcacctgaggtcaggagttcgagatcagcctggccaacctggtgaaaccccgtttctactaaaaaaataacaaaacttagccaggcatggtggtgtgtgcctgtaatcccagctacttgggaggctgaggcaggagaattccttgaacctggggggcagaggttgcagtgagccaagattgcaccattgcactccacctgggcgacagagagcgagactccatctcaaaaaaaaaaaaaaagttaaatgactggatggtgccccatgtaagagtttgcaaaagttcaaactagtgaaactgctgagcttcttcagtacattatgcaactctgccttgcctccaattttgcagctctatcaagtgtacagcgtggtgtgtggggaaagatctgcatcccatgatgtttttgactatggaggtaattatttggagtagctgttctgatgataactcacggaggttcagtctgcagcatggaactgtctctagtcatgattgcctgtaatgatgattacccaaactctggaattataacaatagattttacaaagttagagcataattgctccaccattccttacatgtgcacagattaaacaactttgatctttcaatcagatttttgttactcatcttctgcaatagcaaaggtcagaggcagtagctttctgccacctccctcccctctttttaaatcatcacgaggcctagatttttaaagcatttaacttggtaaagaaataagggctgaagttgtgtggactagaatgagtacaggcctgtggggggtcagaatcccaattctgacatctagaaactctgtaacatacagtcttcaacctgtctgcaactcagcttcctcgtctgtcaatactcacttgtctgaatcattgagagattagaatgaacataggcggccgggtgtaatggctcatgcctgtaatcccagcactttgggaggccgaggcggatggatcatgaggtcaggagttcgagaccagcctggccaacatggcgaaaccccgtctctactaaaaatacaaaaattagctgggtgtggtggtgggcgcctgtaacctcagctactgaggaggctgagcagagaatttcttaaacccaggaggtggaggttgcagtgagctgatatctcgccactgcactccagcctgggagacagagcgagactccatctcaaaaacaaaaaaaaggaatataggctgggtgcagtggctcacgcctgtaatcccagcactttaggaggccaaagtgggagaattgcttaaggccaggagttggagactaacataatgagaccatgtctgtacaaaagtaaaaaaataaaaattaactgggtgtggtggcacacttctgtagtcccagctactcaaggggctgaggcaggaggattgcttgagcccaggaagtcgaggctgaggtgagccatgatcatgccactgaactctagcctgggtgacagagtaagaccctgctgcttttaattttttaaattatttattttatttacttagtttgtttttgtttttgtttttttgagacaaaggctccctctgtagcccaggctggagtgcagtggcgtgatgtcggctcactgcaacctccacttcctgggttcaagtgattctcctgtctctgcctcccgattagctgggattacaggcgtgcaccaccacatccggctaatttttgtatttttagtagagacggggttttgccatgttggccaggctggtcttgaacccctgacctcaggtgatccgcctgcctcggcctcccaaagtgctggaattacaggcatgagccgctgcgcccagccagaccctgtctcttttaaaagaaaggcaaaagaaatataaagcacttaatcagtgccttgcactaatgggcaatcaataaagtgatgctgtatcatcatcatcaattctacgatcaattctcaggctttggaggctttagaatctttctatgtctttggatgttgtggcctttattcaacatacaagtttgtttggagctggtggtcagggatatggtattttcactaagttagggatggagctttgtaagaaatcagtataaaggaggaaaaaagaaacaagcgtcctaaagacagaacatttacagctgagcaagtgctgatggctgccttcaccacgttctgctgcagcggttctcagcatttatgtgcatttctgaaagattcccactcttttctccccagagtctgaatggagaaggtctggaacaacctgagattcagcatttttaggagtgtctctggagattttgaaacacgtggttcaaggactctctgtctcttctccctcccccaaacgagaaactgctgcttgtgtctgagagtcaatacgagatttaaaaacagcaacaaaaccactgctcctggaatggcccagttcccatggccacgaccagcaaagtgggcctgatttccttaggaggggaagaagtgacggctgcagagcccttgaccatctcggtgtctgggctcgagtgtcccgccacccccagcgtctgcaggtcacccccacactgacgccgtctcagtgagctaatgccagtgtctgccccgcgccggctcattcagcagccactggaatgatcaatgaggccggccgcccagccctccaccggctgttggtgaatcagctgcctcggccattcccatctccactgagcaggaagcactcgagctgagcccagccagggctgactggcgtctggctaatggcttttctgtgtcatgcactgaccttgatcccatatgtttttcatacgtgagtgggttggagtgcctgaagatggtccagtggtggaaatagctcttctgccaagccccttaccgaggtcctgggcagtactttggtttagaggtgtctgcttctgaagcaggatcggtgcttttgtttaaattgaggtgaaattcacataacataaaatcaaccaggttaaagggaacaatcagtggcatctagtgcattctcaacgttgtgcaaaaccacctctatccaaaaacacttccatcgctccagaaggaacccctgcacctgttgcatgagttgactagggctgctgtaacaaagtgccacaaactgggtggcttcaacaacagaaatttggggccaggagcaagtggctcatgcctgtaatcccagcactttgggaggctgaggtgggtggatcatttgaggtcaggagttcaagaccagcctggccaacatggtgaaaccccgtctctactaaaaatataaaaattagtcgggtcgtagcggcgtgcgcctgtaatcccagctgcttgggaggctgaggcaggagaatcacttgagcctggtaggcggaggttgtggtgagccaagatcgcaccactgcactccagtctgggcgacagaatgataccctgtctcaaaacaaacaaacaaacagaaatttactgtctcacaattctggaggctagaagtttgaaatcaaagtgtcagcaggcttggttccttctggaggctgtggggtgagggaaggatccggttcggacctcaacccttggcttttttttttttttttttttttttgagatggggtctcgctctgtcatccagactagagagcagtggtgtgatctctgctcactgcaagctccgcctcctgggttcacgccattctcctgcctcagacttccaagtagctggaccacaggcacccgccaccacacctggctaatttttttgtattttcagtagaggtggggattcaccgtgatcgccaggatggtctctatctcctgaccttgtgatctgcccacctcagcctcccaaagtgctgggattgcaggcgtgagccactgtgcctgaccaacccttggctttatagatggccatttttctctccacatcatcttcctctatgcctgcctgtgtccctgtctaagtttccctttattataaggacaccaggcattttggataagggcctaccctaatgacctcattgtaacatgattacttctgtaaagaccctatctccaaataaggtcacattctgggttactaggggtcaggacttcacagtatgtattttgcggggacacaattcaacctttaacaacattaggcagtatcagtactttgttccattctatggctgaataatatcccattgcatgtaaacatttattttttgagccccaagtacaaagcaactgtcagtgaaatctccaccccctgggtagtgtgtgcccatctgtataaggtggcatattgatctcacaggtagagctcacaaatctgcaatgtgtaaactttttcttattgtcttcctccttgaaagagtgttagcctttacgagcaaaagtcaaagcagtactggactaagggaagagaagtcaagcttctgatcctaaaattaattttaaaaattgatttcaggctgggcactgtggctcatgcctgtaatcccagcactttgagaggctgaaatgggcaaattgcttgagcccaggagttcaagaccagcctgggcaacatggtgagaccctgtctctacaaaaaatacaaaaattagctgggcgtgctggtgcgcacctgtagtcccagctgctcaagaggctgaagtgggaggattgcttgagcctgggaggcggaggttgcaatgatctgagatcacaccactgtagtcccgcccgtgtgacagagtgagaccctgtctcaaacaaacaaaaaaaagaggatttcatctttaaattttatttttccttttcctggtcttatccccagtgctgcccacttcctgcaagcacaggtgcacacacacaggtacgtgcacacatacgctcacgttaaaagcgttttcatgtgaccgttctggagaggggcgtggcacagataggagacacagtccttcgagaagacccagacggcagcttgcttccattgtcatggttactgggctcggtccccagggctggctgcagaccagagcctttcagagcttcttcacactcccgtccctgctcctgcctcagaatgaaagagaaaccttcgggcacatgtgtcttctcagctgtgaaactaactgcactgttgacttgtgcatttcatctgcccccttaatttaaaatctatttctgtctcttatgcagacagacaggggacccgcatccctgcagattgttggggaataaccccgagtcctcattagtttgttgcagactcaggccccactcccccatcccagaggcgtcggtggtaatgacccagggtctgtctctaggaaggatggcagcagggtcgcatcgtcctgcgtcctgactctgagcagggttgtacctcatgcaaaagttgtttaatttcctccttcctctctccccctcccctctctcttttccatcaaattcgttttgccacttcgaaagtccactgggggaagaaatgcctgctggtcccagggttttcagagaggcaggaaggcagatggaacagctcatacatgaaaaaaggacagaaaatgttcatatagtatgttgctccacatgattattttagggtaagacaggtgacttttgggtccttggactggaaggctccacactcttcatggaattggatgaaaaggagttaaaagtactgtaggtggtcctcggagaggagcggccttcaggggctcagattatgagccttggctccactcatgggggagccggggcctctggagctttgaaaagctttcaggtgattctaatatccagccacctttgagaaccattgttctaggggacagaggcctccaggagagttgagcattttgagagagggaggatagaagaaatagatgatatctaatgctccctgttcagcaattttgctaattaggcagaaagcaggggcagaaatcacacaccctcggctgtcttgggccaaaccaagcaggactttagctccatttaaccctgtagaatgcaaagggagactccagtgtcccccttcccaaggtttggtcagctgccaaagcttacagactgccagccacccggccgagcatttgccaaggtgatgtaaaatattcacgggaacacgccgtctcgatgttctactcacaactggttctctccctagctcccgaggaaaagtaacatgaggcccatgtggctgccttctcttctcagcagaaggtgctgatgttattagtggcttgccaagctatggttggagggggatgtcaggggcacgctgtggggctgacctttctgtctctgactctgttttgtagtacaaaattggacagctgtacatgatcagcaaacacagccatgaacagagtgaccggggagaaggggtggaggtcgtccagaatgagccctttgaggaccctcaccatggcaatgggcagttcaccgagaagcgggtgtatctcaacaggtgagtcatggcagcctgcgttctgcacagaagccccctcccacctgaccccatggtgtgacagtggaggcagtgggtgtctgggatgaaaaggtcacttggaaagtaactacgtccaccgtctacgaccaccaatctcattgtttttgaaaacagaatctgcccgagcgaggtggctcatgcctgtaatcccaatgtttttaggaggccaaggtgggaggatggcttgaggccaggagtttgaggctacagtgagctatactcacagtactgcactccagcctggggtgacagagcaagaccctgactgtaaaaaatattactacataaaataaaataaacgaaatgaatctccccctccccaccttgcattctgcaaaatcgtcctcaactgcgtttccattaagaggagctttcggctcatctttcccacggctttgatgacgtgttacagcgaaatgtgatcttaagaattcaagagcctggaaggtggaggctgcagtgagccatgatcatgccactgctctccagcctggccaacagagtgaggcccttgaaaaaaagagaattaaaggactttgtctcatcccttggttcagtgttagctgtaggaaagagacggtgctgcctatatgctgtggacaagtaagtgctggaggtggcaatgcaccttttggtctcagtaagattttcatttactactggtgaccacttgggtgtccgaaaagggaatgacaaaacaaacagtcacctgtgaccaaagtggttaagatggcttccacttctcaagtggacccatccttcccaaggtggaggttgtcactctccttttggaagggaaacacatcaaggatgacaaaatagcactagtcaagcgtgccgtttctgctttgcaaaatatattctttaatctcttgcttttttctttttcttttcttttctttctttttttgttttttttaaagacagagtctcactctattgcccagacgggagtgtaatggcatgatctctgctcactgcaacctccgcctcctgggttcaagtgatactcctgcttcagcctcccgagtagctgggattacaggtatctaccaccactcctggctaatttttgtatttttagtagagacgggattccaccatgttggccaggctgatcttgaactcctgacctcaagtgatctgcctgcttcagcctctcaaagtgctgggattacgggcatgagccaccacacccggcctttcttgctattttcttactatgaatggcgtaatggattattagggcttgtctgatcttctccccatcctatactcctatccagcccatttcttcctttcagttcctttctgaaaccttcggaatatttgtggttagatgccatatgaaatatatcttattggcaaagtgtggtggctcacacctataatcccagcactttgggaggctgaaggtggtagatcactttaggtcaggagttcaaaaccagcctgggtaacatggcgaaaccccatctctactaaaaatgcaaaaattagctgggcatggtggtgcgcacctacagccccagctacttggaaggctgaggtgggaggatcgcttgagcctgggaggttgagggctgcagtgagctgagatcatgccactgtactccagcttgggtgacacagtgagaccttgtctcaaaaaaaaagaaaagaaaagaaaagaaaagaataaagaaaaaaaagaaatatattttattgaaattaactgtccattccagcaaacaagtcttacgtcagccatttcatgaatacttttacccctacctgtggcctctccgattggcccatatgtgattatccagaaagtatttccaacaccctagctgggcagtgccccagtttattcactgacaccagtgactgtccattctcagggcctcggacgtggttagacatctctgagaggaaccatatttagattcccattctcgccttgaccccactccccagcagcttgaattggactattccttcttgatgggagactttgcttcctgtcactagggtggatggaattctcccagacccgtgtcctgacagtgaagggcatgagctgattaaactgatgttttaatttgcccagagatgcagtaccagggaattcctgagtcatgatgaaatgcaaatgagattgatcccattcatctattagtagctgtgaattcccaggctttggaaccagttcagtgtccagccagctgttgatttgcaggggcagctgagctctgggtctgtcctgagcatggcttttttacagagacaggtttctcaacatgctgctttggcattcttagcgtggagggtgtaaatcaaatactgagcaagtttctcctcggggatcacctctgcagggcaaagagaagtgaggaagatgccagaaaatagaaacctatggaaaattccatttcttggcatacaattgcattctctcaagttattacctggagaatgttccttatatatgaaaatcaggaagaattttaggaactttgtaagttttgctgaaacacaataagaggcatccagctctccctgtcatgtctgttttgtcatatcatatttatatcatatttatttaaaagaagagtaataaacattagtaagagggaaatttgttataaatagatgtggacttccagtaatagtaaggaaaaagattaatggggaccctccaccacttcccatgacaaacacaggatgaaatataactatgtaaagaagctgagctcaaaacaaagaaagggaaatcctccgaggctagaaataaacaggcaaactgaaaccagagtggaaagcagacccgttaatgctaaggaagggcatcggggggacatcagaacagagtgtgggttctgacatctagggactgggcatgtcatgcccatggggaacaggaattagggcctcaggcccacataaatggaaagttggaactgagaataggatataaaaataatttttgacaatcaaggtctgagagagtttactaactctgagactcatattgaaagaactactaaaggatgtgctgtaagaaagaggaaactgagcccaggaaggagagggagttctagaagtaataataatgaagaaattgataaacaactaggtaaatctttgaatggatgtaggatgttttaaaaacagtaataataagacaacaatcaataacacagaagatgggagggtaataattacagtaaaaagcactttaaggtgctaatattgtttaggaattagaaaaaaatattgattaattttagattttctgtttttctttttttgagacagccagctccgtcacccaggctggagtgcagtggtgcaatctcgtgccttagcctcccgagtagctgggactacaagtgtgcaccaccacaatgcccgactaatttttgtatttttagtagagacagagtttcaccatgttggccaggctggtcttgaactcctgacctcaaatgatccaccagcctcggcctcccaaagtgccgggattacaggcatgagccaccgtgcccagcctaattttagattttctaagacaagtatgcatattcaaaatataaaggtaatctctgaagaggtggtaaaacaatccataacctccaagagaaaacttgatcaatccacagagggcctgggaacacaaaagagaagcctacaaaaagcatgataaatagaaaacacaaatttggatggtaaaataaaatgaaatgtcagatactcacttttctagccaccctcgcagctagagatggccatgtggacctagttctggccaatgagacatgagatttttcctccttgataaaaagagggacgttcaaggagctatctatgctattcaaagagaatctgttctgatgtctccccacttcatgatttgtgtgtaagaaagtggggaggatgggggctgactgctggaaggaacactaatagtgcctaccaagtgaaccttgataacaacactggataataaccataccaaaaagacacttataggccaatctcagttgagaacatagacatgaaaatactatataaaacattagcgaataaaatacctcagagaaaaatgtatcatgacctaatcagatttacccctgaaattgatgaaattaacatttaataaatctgtgtacttattcagagtaaagtcaggaacacattaaggatgcttgttattaccatgtctatccaacattatgtaaaggcctagccaatgcaataaaacaagagagaaataaagaggaaaggaagaaacaaaatgatcatttgcagataatatgattgtctgatagaaatttcagacatttctacagctgttaacatcaatatgagaattcagcaagattgttgggtacaatccatatagaaaaatccacagcattattatacagcaggaaaaataatagcgaaaatataatttaaaaaattttttgtttataatagaaaaagaaacaaagttacccagtaatcagtctataagatatacaaaatcattttggagaaaaacataaaacatttgtggaagacgttttaaaagccctagacaaatagtgaaacataccatattcatggacgggaaatgttacaaagttggcatcaaatctcaaatcaatctataaatttaataaaaatctaacttaaaatgccaacatgttgttttttaaaaaatagaactggtgctgggtgcagtggctcacctctataatcctagttctttgggaggtcgaggtgggcgatcatgaggtcaggagattgagaccatcctggctaatatggtggaaccccgtctctactaaaaatacaaaaaaattagccaggcatggtggcgggtgcctgtaatcccagctactctggaggctgaggcaggagaatcacttgaacccgctaggtggtggttgcagtgacccaagatcgcgccagtgcactccagcctgggcgactgagcgagactccatctcaaaaagaaaaaaaaaaaagaactggaggagatatttgtaaaattcatatgaacaatttggaaagttgaaggaggggcttgacctactagatatcattataaagctaattcagtaattacataagtaattaaggcagtggggtactagagcagagttaaactcatggaacaaagtagcccccagacagatccaagccattattagtgctttgtatttaatagagctggcataagaaattattgaggggaagatgaactcttcggtatatgatgttgagatgactgggcttctaattggaagaatgactagagccctccttcacactacacacacaaataaactccatggctgggcgtggtggctcatgcctgtaatcccaacaatttgagaggccaaggagggaggatcgattgagcctaggagttcaagaccagactgggcaacctgacgaaaccgcatctccacaaaaaatacaaaaattagccaggtgtggtggcacacagctgtggtcccagctgttcaggaggctgaagtgggaggattgtttgagccctagaggtggaggttgcaatgagccaagatcgtgccactgcactccagcctgggcaacagagcaagaccctgtctctaaataaataaataaatagatagataaattccagattgattaaaaacctaaatgtgaaaaaatcagaagaaaatatatgtaaatagctatattatttggagagtagactagaactaattaaataaaaaataaataaatggaatcattaatattacaacactaaaatgaagagcctttgcatagcaaaagacacacacataaaaagtaaaaaacaaaaacaaaaaaaacctttgcatagtgaaagacaccaaaattaaaagaaccatccctgcctggaggtaagtatttcaaaatgcacatatagaccaagaccaaggactagtatttaatttaaaaaaaaaagaaaaactcttatagatcctttttttttaatttgaaaaaaaagacaataatccaatcaaaagatgggcaaaggattgaacatgcaattcagaaaagaggaaatgagaatggctaatataaacatgaaaaaaattcccaccttattggaaaacacaaaataaaaaagcaatagcatcctcttttacacacatcagatagacaaaaattttaaaaatctgataatgccaggtgttcacaaagatatgtgaaaataactcacttccaatgctagtaagagatataaactgataccacctctttagagagcaatggacagcaactggaaaagttgaaaacatatatacattccacttaacaattatatttctaggtagagccctagaaaaattcttgcactgtacacaaggagacatttaccaggagattagtcctaatgctgtatgcaatagaaaagaaatggaagcgattcaagtatctgtgaatgggaatacattatggcacattcacgtaatggaaaattccacagcagttcaacttaatgaactagacatactttgataaatttcaaatgcacatcgtaacgtgcaatatatcagctgcaaaaaacaaaaacaagtcccggcacgatggctcacgcctgtaatcccagcactttgggaggccgaggcgggtggatcacgaggtcaggagatcgagaccatcctggctaacacggtgaaaccccgtctctactaaaaatattaaaaattggccgggcgtggtggcgggcacctggagtcccagctactcgggaggctgaggcaggagaatggcgtgaacccgggaggtggaggttgccgtgagccgagatcgcgccactgcactcgagcctgggtgacagaacgagacgccgtctcaaacaaacaaacaaacaaatgtatatatacacatatagtatgatgccatttatatctactattaagatatacaatatgcataatattactacatttatatatattgtttacagacaaccgcatatgtaataaaagcaccaaaacatggagaaaccaccctcaggttgtggttacctttgaggagggagaggaatgagttggcatgagaggaaactttacctgtatctactacattttattttattttattttattttattttattttattttatttattttttcgagatggagtcttgctctgtcacccaggctggagtgcagtggcatgatcttggctcattgcaatctctgccttccgggctcaagagatactcgtgcctcagcctcctgagtagctgggattacaggcacatgctcccacgcctggctaatttgtgtatgttttagtagagacggtgtttcaccatgttgggcaggctggtttctaactccttacctcaaatgatcctcccaccttggcctcccaaagtgctgggattacaggtgtgagccatcgcacctggcctattcctttttttaaaagaagaaagttcatcacaaatatggggaaatgttagtttgttaaatctgaatggtaatgttaaaattcagaagtgtacaccaacaatggtctattttactgtaatttaaaaataaaatcgaaaatataaattctgggtggcagatacatgcatgtctgttacctttctctcgattttttatatattttttatgtaagtgaaattctccacaattaaacataatattttaaaagtaaattaggtggagaaatgaaacctggttactgtcaaaactggatggattagtgactgattgaataacaaaaggtacagatgatggatagtggcaaccaagagagaaaattctatgtgtaacttaaaaataatgtgatttagtaatgtgactcagaagtctgaatttggtcctattggattttttaagccaacatctggctaaatatctagaagatatcctttccatacccttgagaaacccacagccaggaaggatgataactctaaaagactgagtgagggctggacgcaatggctcacacctgtaattcgagcactttgggaggctgaggcagatggatcacttgaggtcaggagttcgagaccagcctggccaacatggtgaaaccctgcctgctaaaaatgcaaaaattcgccaggagcggtgtcagacgcctgtaatcccagctactcgggaggctgagccgtgaaaatcacttgagcctgggaggcagatgttgcagagagccaagactgcaccactgcactccagcccgggtgacggagtcagactccatctcaaaaaataataataaaaataaaaataaataaaataaaagactgagtgaggatccagaaaaacttcagtagtttggaattacaggccattttctatcaagatgaaattaaataggggcaagtatatggtcttatctttggatcccaaaatacaaattatataagtatgggatgaaacactgataactttgcaatggcctgtttgaaagaaatacagtgggtttagttgacaattcaatatgaagcaattatacatacacacacacacacacacacacaataatttagtgtgtgtgtaatagattatacagctgcaaaaattattcttcaactgaatcaataaaagtaacgtaaaatatctaaaaccatgtacttgataatcttgcccaattttccactagtcagaacatacttggaatatttttatctgttcctaaatggcacactttaaaatggatatagacaaactatatctagaaactcaagtgatagaaagaatgactgaagaaaccaaggatatttaacccggaaaagctagacttgagtgtatcatggtgccattagatggagaagactcagaactgtgtatgccacaagacctcacttagcaggaccaatgggaccaagaccagtgggtaggaatgccaggagaaagacttcggctcaggttaaggaagaaatttccaagcacacaaaccatctcagaatgccttatagtggattttgctattgctggaggtgtttcagcaagagtgagaccctgttcatcagggtgtcctgaagcagattcaaatatctaataggcggttgaacatattgggtggctggttaagttggacagcctggaagatccttttcaaccctaactttctacactcaaactatctatcagtcattgattgtcctgattctcctccagcatacatatgtaaccaatgaggcacaagaaaagaagtatttttagttatgcttgcaccattctaaaccaggtccaccatttcataattttaaaaagttcttgggcgtatttggtagagtatggatgcatattttggaaccagggagattatgagttagcaagagagaaagaaaaaaattgacagaatatgaattaattagataaatccccatcatcataaaagaaaaccaaatccattgtttaatcatcacaacgtagagccacctcaaggtgactcaagtcctccatgcataagtcatgtgactgccttgtgggttgggctgcttcagagtcataattcattaaacgagtatttgctgaaatgtacgacgtacaacacattgtgcaggcattggagagaatcccttaagaaataagccatggtcatggttcttgcctcctgatcaaggtagggtccaaggcattttcataagtccacagggcagtgggtcctgattgttggaccggccgtaactaagatgttcccagtgcccatttaataatgtacacagacaattatcattgacctatggacctgaacgcatgagccggcatagtgagtggattctcttccttacatcaatctgtatgggaagtcaaaccacattcagaaactgccttattgattacctaaagtaattattagaggcactggaaatattcaaagcctgtgtaatcacagcctactctccagttaatgtggaaatgagaaagttgctcaaaggggagttagagtccacaataattattatcactaagcaaagatagtgtaaacatccatctatcgaccactggtgtgctttggctggtggttatgttgtctgtgggggatgagtggcagacaggccaaaaaggaggcgtgaggctttagcagttaaggtccacagttgccagcaagagaaactgagtctcttgagcagaaaggacatttcatggaaagatgttaggagccctcaggatcatctggaggcttaagagtgggcagaaatcaacagccccatgatgacagccatctttaagtagagccagatggcgtcattctgccctcatcaccccctacctctgctgcctgcagccatcagcaccgcagctgccctgagtagatctgaattgtcctgtttttctttccaccacttgttccaaaatcccaaacacaagtgtcccattgggttcccagaccaagccctgggctaccagtgaatgggagaaaggaactgctaaaccgttttccaaagtggctgcactgttttatattcccaccaggaatgcaatagggctccaatttctccacataatcactgacgcttgctattgttgtctttttgatgatagccatcctagtgggtgtgaagtggtatctcgctgtagttttcatttgcttttctctagtgactaatgttgaccgtctcttcatgtgttcattggccatttgtatatcttctttggagaaatgtctattcctttgccaattttttaattgggtccaatgtccgttgaaaatgccatttatccttttaatacatgcctctcatttcccagagattgtggggttgcttcatcttctggccccctcctacagcatctgacatactgttgatatatagtacattatgatggttgcctaatatatttggtatatgagtactaatgcattagtacatttacattagtactaatacaataatacattgggtaattaagagggaatctcgctctgtcacccaggcaggagtgcggtgctgtaatcttggctcactgcaacctccgcctcccaggttcaagcgattctcccgcctcagcctcctgagtagctgggattatagacacctgctaccacgccgggctaatttttgtgtttttagtagagacggggttttgccatgttggccaggctggtctcgaactcctgacctcaggtgatccgcccaccttggcctcccaaagtgctgggattacaggcatgagccaccacacccggcgtgtgcttgggcttttgatccagttcagttaaccaagtaagtagtatgccttgacacgtcttcaaaaatcctggttacaactggcatccaaggaatgggggcatgatactaatcaaattctagaatagtgattctaaataaaacctgtcacccagaaacatatgaaggtggacttttcttttgtcaccttttcttttcacttcgtcgctagcatctctcggatcccttcccactgaagcccaggaggggagggaatgggggtgggggtggaggggcactggagaaaagatggaggctatttttaggcttgtttttcaaccatgaagtgtcatgttcttcaccaccctggctgctggattaattaggctgtgctggcagctgccagtcagggagggttgccagcttctaacggtgattccgcctaatgcctgaattgattttcagggagagaacatttttcccgctacatggcccttgccttccacggcaatgtctcctggcctctgatggctttgggtaggagaggataaagctttcataagtcatgaactcttttttaactgatgggcttgcaaagctaccagctggtccttttacctaacagcttgttgatagaaccttgtggtcatggcttgggtctctctttcccatttctgcttcctgttctcccagatcttccccaaaataagctcagtgcccagaacttgtgtggctttgggatattccactgcccgggcaacaggcaatagagacagcatcagagacatagactctgaccaaatagctcattttcatgctatttttccaagaatctctatggtgattgttaacttctagatatacaaagacaatatttagtcattaaaaaaatacttattgaggccgggtgtggtggttcacgcctgtaatcccagcactttgggaggctgaggcaggaggatcccttgaggccaggagttcgagacaagcctgggcaacatagtgggactctgtctctacaaaaactttaagatataggcaggcgtggtagcacactcttgtagtcctagctactcaggaggctgaggcaggaggactgcttgagcccaagggttcagggttgcagtgagctatgatggcaccgctgcactccagcctgggtgacaaagtgagaccctgcttctaaaatatgggtctcccagcactttgggaggccaagcaggcagatcacttgaggtcaggcgtttgagaccagcctggccaacaaggtgaaaccctagctctactaaaaatacaaaaattaaccaggtgtggtggcatgcctgtagtcccagctactctggaggctgaggcatgagaattgcttgaacccaggaggtggaggttgcagcgagctgagattgcatcactgcattccagcctgggtgacagagcaagactctgtctcaaaataaataacataaaatatgggtctctctatccatttattcatttatttttatttttttaccaaaatatataagctgctgcccatgctatgtttgaaagatggctccttatctagtaatagctggtcaagttacttgactatgtgaatattagactgtatacatagtctatacatatatatatacacacacatacacagacggagagacagaaacacctgctgggcatcacacaccgttctaggtgctggggttgcaatagtgaacagagcaaacatccctgccctggtgggacttgcattccactcgggagtgacagtgcacaatagccataataaagaacagtatattggccaggtgcggtggctcacccctataatcccagcactttgggagcccgaggtgggtggatcaagaccatcctggctaacatgatgaaacgccatctctaggaaaaatacaaaaaattaaccgggagtggtgtcccgcgcctgtagtcccagctactcgggaggctgaggcaggagaatcacttgaacctgggaggtggaggtcatgccactgcactccagcctgggtgacaaagtgagactccatctcaaaaacaaaaacaaaaacaaaaacaaaaacaaaacagtatatcgtctagaatatatacttttatatagtctgtatacttatgtatattacatattatttatatagggagactatatatgtatatatatatatatatatatttagaaggtgataagtgttatggaaaataatagagcacatggggtgcttccttccaacctttcagtccatgctatcctattctgtccccatctgagtacttaaggacttgtgagggactctcatgctaccgggcccctcttccctgtgctcctgtaggaactcatagaaacagaatgtttaggcctggttgggatctcagaggttttccaggaggctttccacctgggttctgcctcactgctgatggatgatggtgtgtcctgtgtcgccttgccaggggcttctcagcacactgtccacataaccctgatgctgtccaagctgagccttccaggaacctgcaggaggcaggctccttttcccagaatcctgacacaaactgtcttgttaagcagggaggtcgggggtggggcccgtgagtccaagttcaaggaacttggtttctggccagtccctgccggggaggccccggcagccttgcctcccacagctgataactctggtcccgaaactgctcacttccctactgccatataaacaattacattaagagcacaagtaaaagaccagccagaacaatcacttagaagagtaactaaatgaatcagagcagctggagaagatattttaagaccccagaaatcactgcacatagaactggatgggggcaattgattatgaatcaaacagatgtcaattgccagttttagtacaagaaggaaacaaaaggtcagtatattcctcctggactatcttgtgagaaatgaggatatgaaggtagcagagttctatttaaaatgagctgcagtcatttcagcataatctcagtgcagaacatggcaggttttaggtacgctgttgagaagaaaattccaggactgtcttttctgctgggaatgttcaagttctggtaaaggccaggtgcactggctcatgcctgtaatcccagcatttcaggaggccgagatgggaggattgcttgagcccaggagtttgattccagtctgggcaacatagtgagaccccatctctaccagaaaatttaaaaattagctgggtgtggtggtgcatgcctttagtcgcaactaccagggaggccaaggcaggaggatcacttaagcccaggaagtcaaggctgcagtgagatacgatcatgccactgtactccagcctgggcaacagagcgagaccctgtctcaaaagagaaaaagaacaaaataaaatttctagttaagaccaccgtaattctgacccctgttgagaaaatgaaattagactctatttagacacgtttggcctaatgatgttcaaaacctcctggagccaaagcccaagtgagcatacattgcaatgtgagatcaggtaccagggggagttttgaattttgtgatcatagggatcgtaaagtaccagaagcttctaatggagggatgatttaggttctgctccagaagctctttatgaagtaggtaaacacccataacctgagaccagttcagattatgcctgcccctgaaccttcttattaaatcagttgtgatttcgggaaccttggggaatttatgacatgagagatgatctgccagggttcaaaaccttgttgctgctgatgctttgggctggatctttatttgctgtggtggtggggggcggctatcctgtgcatcataggaggctgagccgcaccctgggcctctctctgctcagtagatgccagtagcactgcccaccccacctcgcctctgttgagacaaccgaaaatgtccagacattgccaggtgtctcctgcaggaggcaaaatctccctctagtgagaactcctgttctagggtgaccaaccatcccagtttgcctggaactgagggattttctggcaggtgggactttcagtgttaaaaccagggaagtcccaggcaaaccagatgagttgtccacttggctgtgtcattgatatgttctattttataccaacgtttaaaagtaagaacccgggctggccatggtagctcatgcctgtaatcccaacactttgggaggccaaggcgggtggatcacttgaggtcaagagttcgagaccagcctggccaacatggtgaaactttgtctctactaaaaatacaaaaataagcctggcgtggtggcatgcacctgtaatcccagctacatggtaggctgaggctggagaatcgcttggacctgggagatggaggttgcagtgagccgagattgtgccactgccctccagcctgggcgacagagcaagcctctgtctcaaataaataaataaagtgagtaagaaaccaaagcttttgaaaagtctgtctttgggaggcattgacaaggcatctgggggaatatgatgctgcttgtggtatcattttgcccctctttttcctcaatgtctctaaagcctgagccctggtgagatgggccattggaggtttgatcctagcccatagaccaaggagactcgattcaaacttgctgcctttctaatagagaggctcttgtttgacacttagagtgagcatgagtgacagactttttcttggaattgtaggctgtgtgacagtatacatcatgaaagtgacagcaacagtggggactaatttaattccattttcctttgcaggccctgataaatcattgctgcagggaaaaataaattttactttctcagacaaatgattggaataatgatgtgctgtgaggaaatcgggggctgagagaagatctgttggtgggcttaaaagtatttaaatagcgcatcatggaacttgttgcaaatacctctcgcgtctggcctggaaaataccagaaggaacctcctttccagactgattagaagagttcaggccgggcgcggtggttcatgccagtaatcccagcactttaggaggccgaggcgggcggatcacctgaggtcaggagttcaagaccagcctggtcaacatggcgaaaccctgtctctatagcttgaacccaggagacggaggttgcagtgagccaagattgcgccactgcactctcgtgtggggatagagcgagacgtctcccaaaaaaggaagaagagttccataaaatatcagctatcttgactaaatgatcgtggttttttaggccatctcaatggaaaaggtcattgattatcgtgctgcatatcctatataagttggtggctgaaacagctaaaatagattctagaatctggggtcctgagggaccatttacaaatagaaaaagtctcgacttggatggaaaattgccaataattttcacctcccttccagaaaatgactgtggctcaggagtatagttctgctgggaggcttttaaattgctataggaaatgaattacggggcgaggaggtacttgggccccggactactactatgcatgaggattggagtgaatttgaggaggggtgcaatgtagatggaacccctgcccacaagaggacagtggagaaggggctttaataccgtagggagacatatgcgctttgtctaagctaaacaatgcctggcttacgtgagggagattctccaaccctgagtcagtccattaaaagcacaagaaaatcacctgcctgcaaccagaatccacatcttcccacactaccattggcatattgcgctagggtgtgggggcaaacaggaaggaaccaggggaagttttgctcatgaccatttcctgcacgcgagccagtgtaattttcccactgtcagcgtcacctgagttgcactccaacttcggtgatggatggaatacatcatcagcgaaagctataaaaaccccatccttttgagcagcgtgaacgtaagggaaatgagcagttactgcagagaggattttataggagtgaaaaattctgcatcagagcagcaagaaggattgttatgtgaatgatcaaactgcttctgctgactcctcagagcccgcctaagagcaggggccttcatctgacactcactccacttccggggaactttgctttcctatttgttttaaccctgattaacagcgcagagctatgggttaggtccggccagccactgagagtccatctttgtgttttcaaaagccaggcctggttactgtcagaaataagagaaacaactggaaaagacaggcaaggtacgcagtattttacgggctctgattgtcatttagatttcgcatccaagaggggtttgagacttggggttctgttagctccatgtcccttccagcctcctggttctatcagcttggaattcaaaaccgcttcttgatgtttcttatttccaacatgtagctaagttgctgagagtatacgtcgtcttcctggatccgatcgactgctaggcatgagtggcccagacacttagctataggccccagagtagaaaagtagcaaatggtagcctctggaaggacagaaacacttggttatcgggctggaataaaaatgaaatcatgggccgggcgcagtcgctcacacctgtaatcccagcacttttggaggccgaggcgggtggatcatgaggtcaggagatcgagaccatcctggctaatacggtgaaaccccgtctctactaaaaatacaaaaaattagccgggcgtggtggctggcgcctgtagtcccagctactcaggaggctgaggcaggagaatggcgtgaacctgggaggcggagcttgcagtgagccgagactgcaccagtgcactccagcctgggtgacagagcgagactccgtgtcaaaacaaaacaaaacaaaacaaacaaaaaagtgaaatcatgcagatgtatcttaaggaatagaaatattacatatttcaatataatatttaaggaattagctggggctgcactgttctctaagttttgcctctgaagaaaaacaaaacattgctttctggtttgcaaaagaccctgggacctgtgccttttgagaatttgttttctgcaaatgactgctccagaggaacagctgtgtcattttattggctttctaataactttccgaaacaaattgctgcaaattaggtggattaaaacaacacagatttatcctctagcagttctgggggccggaaacccaaaatcaaagtgttgttttcttctggggaaactgagagagaatctgtcccgggcctctgtcccagcttcttgtgttctttggcttgcagcaacatcatttccatgtctgcctctgtccttgcatggctgtcccctcggtgtgtctctgagtctcaaatctctttctcctttctcttataaggataccagtcattggagttagggcttaccctaaatccaggatgatttcatcttgtgatctttaaattaattacatctgcgaagagcctattttcaaatcaggtcatattcacagttactggagattaagatgtggatccatcttttggggcagacacaattcaacccactacaactgtattttgttgctcttcctatctctaagttgctgctctctgttggttttgtccattttcaaaatgtcacttgtatgagttgcttaggctgacatctatctctaagattagcttcctctccctgccagtgtttgggcttaaacattccgtgataccactcctaggaggcaaaggtcaggctggccaaccctccaaacatggaacccttcaggccctgaattctcatgtctttgcaaatccaaagaggacaggctgacagtctgatggagtcccccaccaggctgtagccttctgtctttacacattttgagagcacttgaatatgcacgggaaaaagttaactatgacaaagaccgaagagatggggaaagggcagctgtggagaaaagagatgccccagaatccccctgatttctccagcattttatccagaaagatgtggtagtgtggtgagactctgaacagactccaattgtcttttttctttctttcctcttagcaaactgcctagttgggctagagctgttgtccccaaaatattttatgtgacagagaaggcttggaactattatccctacacaattacaggtaagtccttagtacaaccatatggcacatgtagtgagtgcaaggacatagcatagttgaatttcactgatttacagtggattatccaagcagggccttgtgggagccccgtagtatccctctttttttttttggtttcttacttgtaggttatcaacacttctaacacagacacagagatggcaggtgacaggggggttaagctaagccattccatcttcgttcttagagttacaataaatagtttacggagggccaggcgcagtggctcactcctgtaatcccagcactttgggaggccgaggcaggtggattacgtgaggtcaggagttcgagaccagcctgcccaacatggtgaaaccccgtctctactaaaaatacaaaaccaggaggtggaggttgcagtgagccaagattgtgccactgcacgccagcctgggcaacacagcgagactccgtcaaaaaaaaaaaaaaaaaaagcttatggagaaggaaggtgaagatctttatagagacatttccagaggttttatgattcttatttccctgtttcctcaataattcccaagtaatttaggggtataatttgtctgtaaacaagttgcttattatgacttgtttgtttttaccactccaaattttgactatactttgtataaaagattctattggatctctctttgcccccagatgacttcctttgctattagataatatgaaaatatttaaggtcagtctccctctcacttgcaatgcgatgacaataaactctttgtactgaatactgtcctagaaactttggccaaaaaaactcagaaggtttggttcctgccctcaaacacaccaaaatttgaaatcccacctcaacgtcatcaataacaagctcttcttattggttacaaaagctgcttttccacttaaaagatttcctttgtggttaatgaaatactctactggaattattagtctttcatttgcttttataatgccaactctttggtttttaattagccacaagcctataggctaattgaatcttgtcttactgttcttatctgcccaaccacataagtatcatgaaagaatttcagtgcaacacggagacattcagtatttatgaaagtttcattaggacatcttttgtaattatagttcgtcagtatttgttagttctgtggtttttatattgcatataagcatgatctaaatcatcttttgtctcttttttctttcctctcttcttcaaatgaacatgtggaaacagaatacacagtaagttccatttaattatttttaaacattctgtctatgatcagtggagtaattggaatgtctcttgtattacttgtcttatcaatgtaataattaaaaaggggaataattccaagtcagaaatatttaaatgtaggctattgcatcgttatatataatgcaataatttgaatgttctcatttgttcaagaatgtgaatcctaattgaaatcgccttgatagtcactttacgtaatcagcctttgcttgtaatttttaaatagcttgactgctttgttggtgatagttcactataataaaagaacagtttctagcaacgtgatattaaagagatgatggtagttatcgatggaaggtggggcttttactcatggactgtgtcctgattccttgttggagaagcttgaaagtgaagaggcacatgtgcaaactattttgcacaacagagatctgggttgggcagtcgctgtggcttgataaaatttcttcttctcctaagagcctctagggttattacttagactgaaagaaaaaaagacagaacctataatatcattgtgttgtggtattttcatttagatcattttcccaagcagctaacaggtcaacctatcacaacaagaaaatagtttatgatttttttttttttttttttttgagatggagtctcgctccatcacccaggttggagtgcagtggcacaatcttggctcaacagaaactttcacctaccgggttcaagcaattctcctgcctcagcctcccaagtagctgggattacaggtgtgcaccaccacgcccggctaatttttttatttttggtagagatggggtttcaccatgttggccaggctggtctcgaactcctgaccttaggcgatccgcccaccttggcttcccaaagtgttgggattacaggtgtgagccaccacacctggctaatagttatgattttctgagctgtgttaagagttgagtttttgggttcaatccaaatagccaaaggatagagaggtggtgagagaaatggaagaaaatgatttgtcatgccctgggcaggagcatagtacccaacgcatcgtaggtgctcaatcaatagttattgaatgacagaatgaacacacaaattctagatagataaatggtcccagcacaggctttggcgtcagaaaggcttggctgtcctctggttttgccactcactgccagaattcctaagcgactggctcccaactgccagttcttgaattcacactggtcctcgactatgttctcaccagtcctctgcagaatgaagaaaaaacaggaatagtattcagagattttcataacattaaatttatttcatccaaagtactgttggtaattatatcccatcatactcggatattaaaatatcttttcttttttgaaatgataggaatatatatagtatttccccccgcaatgtccctaactttgaaaaaagaggcaattttatggcaaaatgcaaatgtaaaattttagaagcaggggaacctttgctctagaatgaacatcttaacttttctgaacctgtttcctcttttctgaaattagaataatccctccttcctagagatgttagcggaaggattcagtggtctacccttggattggaaaacattgtctttagagggtcatattgtaaatgttttctgttttgtgagtcatatagtctctgacactgcaagagcagccttagatagtatgtaaacaaattagcatggtcatatatgcccaggcagcgggtcaaatttgtcccccaggctactttgccaacgctaaatataaagctgttagcacactgcctgtatacagcaggtaattaaatgattccctaccaccaacactaccccctagttccattgcttctggcaactgcataatcatcaagaggtagactttgggccgggtgcagtggctcacacctgtaatcccagcactttgggaggccgaggcaggtggatcacttgaagtcaggagttccagaccagcctggccaacatggtgaaaccctgtctctactaaaaatacaaaaaaaaaaaaaaaaaaaaaggtagttgggtgtggtggcgggcgcctataatcccagctacttgggaggctgagacaggagaatcatttgaacccaggaggcagaggttgcagtgagctgagatcacaccactgcactccagcctgggcaacagagtgagagtccatctcaaaaataaaaaattaaaaaattaagtcaacggtcatttattaggcatcagtgaggtacaaaacatcatgctagatggcataactgagcaattatctctgtcatttggggtcacaatctggttggaaatagctggacattccagtcaaagcctggcagtcatcagcaagtgctgggcttttctggaggcaagaggggacttagccaaggaaacaagctggcctcagacctgtccactgggctggataagctctgaactgagctgccagcagagattcagacctcagcagagggcagaatcaatgactctggggaatccaaccagataaagcagttgcaatgtgaaaagaagggtgctggcctctgcattggggccttgagttttggggacagggctacagtccccaatgtgggagacaggaagaaaagtacacagcactcaaggaggttactcagtatcatggtgctggggagataaggttgtcaaccttagtaagtgaaaatacagaatgtccaggtaactttgaattttcagataaacagtaaataatatttagtataagagtgtcccacatgttgcatgggacataattatgccaaaagattgttgtctcatattttgtctggcaaatttatgggagagagatggtggtgtggaagaactggtctcagagactcaagtacaaaaatcagttatgagaacagggcacactgatgggccaagggaagggaggggtccagaagtatgtaatgtgggaacccatcctgcaattgacatgccataggaactctaaggtcagaccagagattcagccatctggtctgaatctctgctggcagctcagctcagagcttgtccagctcaatggacaggtctgagactaacagtcaaatgcactgatgggaccactccaagagccttcctgcctcagttaggattggctcaggaggtggaatggaaggagctaggcagagttcgggaaaattaagtggtagcagatgaatacataactgtcagcattttaaggaagaactgtgttgcatgtaagtgttagagctgaagtgcagacagaggattgtaggaaggagagagggattctgccagggagaaatatgaggaggtttctcagagaaggtcgcatttgggctggacctgaagggacagtacaactccccctgcagaggcctgttctgtgttagctcatgttgctctaatgaaacaccacagacttgggggcttgagcagcagacatttatttctcacagttgcagaagctgaaagtgcgactgggttcctggtgagggctgtcttcctggtaagcacgtggccatcttcttgctatgccctcacatggcagagacagagcaagttctctggtctcatctttgaagggcactaatcccatcatgagggccccaccctcgtgacctcatccctacctgattagtcccaaaatcccatctccaaacaccattgcactggggattacagcttcaacataggaatttgggggagacacagttcggcccatagtatgctccttccaggaccagtgggcaagtgatggaggtggatcctggccacctggacacatggatggagggcaggtcgtggtgttttcaatgtcaggtcaaggtctagatttaattctctgtgaggaggtcacattgttcctggctagttcacttttattttccatcccaaatataggacagcttttctttccatctccctggtgacaaggggatccggatttttctctctggctctagtgcagtcctccgggcccacagtgtgcggtttgaagctgccacctcttgactcagattcagccgtgttctcacgctctctgtccacgacagccctggtggcagaacccacccttgactctgactacagagtctgcacccaggatttatgacagatgctttcagttgccttagtcttttttcctgttttaaatgcttttgaattgtgctctttatcccctgatcctttaatcctaaatacctcttcttgctgtctttcccaagctccatagttcctgttcggtgcctcaaagcaaaacttccccaaggtcagagccccagttaggatcacggtgcccttcctttcctcagagaggcagcccggagggctcagaaacctccaaaccaatgtctcttcttggaaagcattagtccagagcacgaggatgtctatactaggatcccctaggtcttatatctgactgtttagcctattactcagacctcatgctgccctcattcgtgacaaagcccaggcaaagaaacctatttagagtcatctagggcttcagcactatcacaattatcaagacataagagctttttcatcactgtgagtgactgcgtgtgtttagaattatgtggaaatgccatttgcccaggaagtgggaaaaacatctttagcttgcttatgggaaaaaaaaaacacttaattatacagtaaacaacaacacaatgacagtttcacagaggacagaccattcaaccagttcttccaaactggtgggttcttctgaagttggtaaagtctgcaaagaaaggtgcctgaggagactggctgccttccaaaggagttgattttgtttttctagagctaaaaaaaaaaaaaagtctgcgctttcagatgagcataaatcagcagtatcaattcagccttggtactaatgaagaacaaaggattttcttcttgtttgtaggaatttgaaaacttaagttacaggaaatggatagcagggacctagagtaatacagttggcgtatatattttgcgaccgtgatcacccctctccaccggcatctctcttaataagaatccacaaaagaggagaaatgggatgcacctttgtgttagttagaatgacagaagcaaaggcagatgggttgtcaatgttacccaacattttaaattatttagatgagagaggtggaaaaataaaattgcaacagaccagggaggatgaaatgactctttcatgagaacctcaaatcgtattgagccactatgagagagagattactcagggctggtttagaagagccaagaaagagaggaaaggctgctcacagctgagagtctgtcatcagtcaccccaggtgaacccgggttatctgcccaggagtggccatggggagaatgaggtatgtttctgaaagccactaaactatctgggataggaattgccctcacagtctgggccttatcaagctcccccagtaatccaaagagctgataggtgctgtgtttagagaccagtgacccccattcctcccaagccccgtctcctttcttaagcctttcttccccgcaccttcccctgagtcccagccaaggggcagtacaaaccactgtatttcataactaggaacacaggaacaagtccagggaagattatgtttattataccagacctctaggattgggcttgttaggaaattaaagaaaaaaaatctggctatctcatctacgatgtaagctaagagggtgaaagtccctaagagtcccttctttgaggccatggagtcaggagttagcgggttaggaaataacttttatctatgtatcacaattaaccctcgatatttagtgcagtacataattttttttagacaaagggaaatatcctttttttagggaccaggccaaagaaacagtcctccagttgggggcactgatgagcaaggcagcaattaggcacgggcctgaaaagcacccttgtggagaagaggacagtaaggccaggtgtggtggctgatgccagtaatcccagcatttcaggaggctgagataggcggatcacttgaggtcaggagtttgagaccagcctggccaacatggtgaaaccttgtctcgactaaaaatacaaacattagctgtgcatggtgacgcatgcctgtaatcccagctcctcgggaggctgaccttgaacccaggaagtggaggttgcagtgagccgggatcatgccactgcactccagcctgggtgacagagcaagaccctgtctcaaaaacaaaaaataaacaaacaaaaaaacccaaaaacaaagaagattatgtgagaccggtgtcatcacagagccagaacgaccaagctcaaaaatcgtcacagttctagagaatttagatggaagcagtctagaaccatttataactaccattcaagatggtacacagcccattaagtaagggatgggctatacagagctaaacagattttataattataggacttctcagagcctttcttattctaatgtacattgtgaatctccaaagggagctgtggcatgcaacgtttcccgagctgatttgtccaagggatcttggattttgcaaggccaatcttttaagacttagaggtgttccagaaacttctctttaggtcagagccattatgtgcccactaactatgccagtggatcaattctatttcagtaaatgttatttttttctaaatttcagtgagctaatgtgttgcctgaagatgactattactcagataccaaagttttttgaagaatgcccaacagtaatggaagtgttttatttttagaatcaggtgacacagaacccgtaagttccttttcaagcaaagtcagttctgttcaaccacacagcaaagtcagcagtacgttgggatggcagtgggtttgtgcatttggatttgtttccatttagaaaatgaactggttgtatggacgagccagttgcaaaccagcctattcacagatgtaccgctgcccttgtgtgggaccagagctcgcctctacatctcagcaccccaattagtgcctggtgaagcaggagctttggaacagccagttttgtttgttcagattatcccgtttccacttgctctagctgttcccaagctcttctttggacttcagagaaaattaattcagccattttgaggggaaagagcaggtgatagaacacgtggctctactgtaacaaaacataacattttaaaattgtttgcatttttttaacaccactcgaaatgactttacagagggcaatcagcagagaatacagagttgtttaagggaatgtttggtagaagattttactaagaaattctccttttcttcttttttgtttattttccacttgcagtactgaaaaatttgatttcccttctgcagtttacaaatgtctgtggagttgtgttcagctcagttgttgagatctgcagaatacaactggaaagattttgtgagcagatttctttctgtaaaaataaaacagtatgactatgggtataccaacatagtatatttcagggattaaagtgaatgcaaaggccgggtgtggtggctcatgcctgtaatctcaacactctgggaggccgaggcaggtggatcacttgaggtcaggagttcaaggcaagcctggccaacatggcgaaaccccacctctactaaaaatacaaaaattagctgggcgtggtggtgtgtgcctgtaatcccagctactcaggaggctaaggcaggagaatcacttgaacctgggatgcggaggttgcaatgagccgatatctcaccattgcactccagcctgggtgacaatgtaagactctgtctcaaaaaaaaaaaaagggaatgcagaattgccctgaggtctttgatctttttgatcagtaagataatgtgaactacacgatagtgtgtatttctttactgtctagacaagtgttgatacatcttttcagttcagaattttaaacatcgattctactttcttaagtgagaatttgctaggttggtgaagggggatgattcttaaccctttttaactgagaaggcttgccgtctgaaagtttcttacctggccatatgctcacctgtatttgggaagtcacactgatccattcccatctctgttattattatttttaattataaattagaggcaggttttcgctatgttgcccaggctaattttgacctcctgggctcaagcaatcctcctgcctcagcctcccaaagtgctgggattacaggcgtgagccatcacgcctggccctatctctgttatttacatgcaattctttttatttgatgtggtctccctgtctctttaaattcttgtcttgccattatagtatgtagatatcagtattcatgagcatcctctgcttatttctgccttgacaagtccagccctagatcgtatgagcctgaatttcgtttccctgcatgattatcctagaagtgcaagtgagtagcaaaccatcccccattcagaaaacatgctttcattcatgtcttcggctctgtctcccttctggccttgctttcctagtgagttgctattactcagcatgtcagaggacgggaagaggatccatgagtgaatgaactaatgaatgaacagaagcctctgtgtagggtgcgggctggtgaggagcagcggagaggcccgcgtgcatttccatgctgtagctggaatacaagcagctgttttccggctgtgtttcggagctctgccttccacacagtcccttcctctcaccctcctccacatctctttcaggtcccaccattcctcttggccacatttttcttcctatgcagcatatatttaggaagtcactctgattcatcctcatctctattatttacatgcaattccttttcttcctttcctctttccttgaaaagtctactttttttttccccacttgagttcttcttctcacttttgtggaactatcttctttgcaatttttttctccaactaccctgtcaccataaccacccaccttatttgtatctaaagtcatacgtaaccctcacaaggcagaagggcgaagggagctcaaatatctccccttatttcctttgcatctttgcctgtatgataactaaggttctgagtagagggtgacggccagacatttacctttttgaaattgatgtgtgtattaaagatcttctgtgcacaaaacagaaatttatattttgccttccaagcgtggggtaaaatttctatcaaaatggggagataaaaattttttaatgaataaaggaagctgaaaggtattttaagatctaggttctaccaactgtctgtatacacatttatcatccactttcttctacttttcaagcaacacaggcttttctcatttattttccagtagctccagcctcagagtcctggaagataataagccctaaactctatgcctgccctcattagcactgtggaacattctggatgtgagtctcctgttggtgaacagaggaaacacttgcaaatctagttttattaatgatcccatcttaagttgcaattcccagtgtggctttggagcacagttaatatgacaatatagaatacagtaccagagaatcgatgtcatctacaggggaactccattagagagaaagtcaagtctgtatagagtttcgtgcttgtggatagcagggaacacgttctacatactgttggaacaagatggcaagagaagaatgcattgaattccagataaaagctaaaaggaaattgtcttttaaaagcctataaatacttcatcaaccccaagccagctcctcaactcttccatttaactttcttgatgttaggcccgttgtaaagtgctgctctcagacatggaagaatttgggctggtaaacaagaataaagcgttgagttactgggctgagggttcttctcaatgagtggttttcaaactgtcctcctttaggtccaggagattccatggacaggtctcagtggccattctgtccctaatattttatttaaagaaaaactctgatgccagttaaaatggtttgaaaactactgaactgtaatatctctcagctcctgccctactctaaagaccatgaataagtgtgatgtatgtgggacaggaaccacttgaagcagcagttcccaaatttaacagatttgcaactcctctgtctacttagtggtgcttatattagtcaaggttctccagagagacagaaccaatggtgggggagatgtggggagagagagaaatgggtggatggatagatagattagatagctagattagatatgtagattagatagatggatgaatagatagatgattgatagatattaatagataagagagatggatagatagattagctagattaagtagatagatagatgatagatattaatagatagattgattagataggtagattggatggatggatggattgatagatattaacagatagatggatagattagataggtagacagattagataaaaagatagattagataggtagattgggtggatggatggatggatggatggatggatggatggatggatgagaggggatttgctagggaaattggctcacatgattagggaagctgagaagtcccacaacagcccacctgcaagttggagaccctggggtgccagtagtgtggctgagtccaagtcagaaggcttagaaccaggggagccgcgagtgtaggtcctggagtccaaaggctgaggagcctggagtcgttatccaaggacaggaggggaggagtgtgtccccactccagcagatagatccatacatttgcctttcctctgtattggtcctctccagcccctcagcaggttggatggtgcccacccacattgaggatggatcttcctcacctagtgcataccaactcacatgacagtctctggaaacaccctcacagacacacctaaaataaggctttactaggcttctaggtattccttaatctagtcaagttgacgcctaaaattaaccatcatagtgttctttataacataatcctctttaagttaaagtagattaaattataagaatttttggaaaaccttgtgacttcctgtaagataatatagttactctgggatgccattgatgtattcactcatttttaaattggatttaaattttttctgcttactaaaatagtagatatttattgtaacatccaagcattataaaaatctataccacagaaaataaaagaacttcataatttccactactctcctccatgagaatattttcccatgtttttcggtgggtatactagtttttcaatgtttttcagtgtgtatactcgtttgccatgtttttcagtggatatactagtttttcaatgtttttcagtgtgtatactcgtttgccatgtttttcagtggatatactagtttttcaatgtttttcagtgtgtatacttgtttcccatgtttttcagtgtgtatactagtttttccatatttttcagtgtgtatactcatttgccatgttttccagtgtgtatactagttttccatgtttttcagtgtgtgtactagttttctgtgtttttcagtgtgtatactaattttccatggttttcggtgtgtatactcattttccatggtttttgatgtgtatattagttttccatgtttttcagtgtgtatactagtttttccatgttttttcagtgtgtatacttgttttccatgttttccagtgtgtatactagttttccatgtttttcagtgtgtgtactagtaattttccatggttttcggtgtgtatactcattttccatggtttttggtgtgtatattagttttccatgtttttcggtgtgtatgctagtttttccatgttttttggtgtgtatacttgttttccatgtttttcggtgtgtatgctagtttttccatgttttttcggtgtgtatacttgtttcccatgttttccagtgtgtatacttgttttccatgttttgcagagtgtgtactagttttccgtgtttttcagtgtgtatactagttttccatggttttcagtgtgtatactcattttccatgtttttcagtgtgtgtactagttttctgtgtttttcagtgtgtatactagttttccatggttttcagtgtgtatactcattttccatggtttttggtgtgtatattagttttccatgtttttcggtgtgtatgctagtttttccatgttttttcggtgtgtatacttgttttccatgtttttcagtgtgtatactcgttttccatgtttttcgatgtgtatactagtttttccatgtatttcagtgtggatactagtctactttctttttgtttttacaaaaatggggctatcctgttttacactttgtttttttaatggttttagagtcgatcccaatgtacttaaccagccttctactggtgaactttgacttgtttccaagtttttttataggaccaacaatacagttaatgaacatgtgtttttttgtaatattttttcacatctcagaattcatgctggagttctgggcagggttttttgtttgtttgttgttttttgatacaggggcttgctctgtcacccaggctggagtgcagtggcgcgatcttggctcactgcaacctctgcctcccaggttcaagcgattctcctgcctcagcttccctagtagctgggatgacaggcgtgcaccaccatgcccagctaatttttgtatttttagtagagacagggttttgccatgttggccaggctggtcacaaactcctggcctcaagtgatccacccgtgtcagcctcccaaagtgctgggattacaggcatgagccacccacagggcctggacctgtttttaaaagcactttcataataagaattaacctaagccattatatttcaattcagtttttgaaaattattgtgttttcaaggtactagggtaatttggcatctaaaggaataccaatgaatttctgaaatgaataattatttccctaatatatcttttgagtaactcctgcttttcctgatttgggtttgtttgaagcaaggcacgtctatcatatgacagattcacacacacatattttctctgctgttagtggccacagcacatactgagaagcaaagcctgtgctttcaacctctgcttccctggaagcacttccatgatttcctgatacttaagaatcagcatgagatcacaagcatgcatgtcagagctagacagcctggcttgaatcccatctcctctatgcatttgttgtgtgacttacagcacactgttggacctttccgtgcctttgtttcttcatctgtaaaatggggatgtatgagggttaatgagttaatagatgaactaatatatatcaaatactcggaccagtgcctgttgacaggaaggacggtataacactattgtcattataacctctgtattgggttgtgtctgtccctcactggacatgtggaatgttggccaggtctcctttggattgtcattttgacccagaacctcccagagttaagaaatacctggacaggccaggcgcggtggctcacgcctgtaatcccagcactttgggaggccaaggcaggcggatcatgaggtcaggagatcgagaccatcctggctaacatggtaaaccccgtttctactaaaaatacaaaaaattagccaggcgtggtggcaggtgcctatagtcccagctagtcaggaggctgaagcaggagaatggcatgaacctgggaggcagagcgtgcagtgagccaaaattgcgccactgcaatccagcctgggcgacagagtgagactccatctccaaaaaaaaaagaaatacctgggcgacgagacgtgctatcaaggaggtggggaagttggaactctcctacactgttcatgggaatgtacaagggtgcagccactttggaatggggtagccgtctggaagttcctcagaaggttaaacatagagttacagtgtgatcagcaattccactctaggtatacactcaagagaaatgaaaacatggccgggcgcagtggctcacacctgtaatcccagcactttgggaggccgaggtgggtggatcacgaggtcaggagtttgagaccagcctggccaacatggtgaaaccccatctctaccaaaaatacaaaaattagctaggtatggtggcaggtgcctgtaatcccagctagtctggaggctgaggcaggagaatcgcttgaacccagggggtggaattgcaatgagccaagatcacaccactgcactccagcctgggcaacagagtgagactccatttcaaaaagaaagaaagaaaggagaagagaagagaaaagaagaaagaagaaagaaagatagaaatccacacaaaaactcgcacaagaatagctgtggcagtattgttcatagtagccaaaaaatagaaacaaatgttcatcaactgataaatggagaaatcagatgtagtatgtccgtacaatggactatcattcggccagaaaaaggaatggagtacccatacatgctagaacatggatgagccttgaaaacatgctaagggaaagaagccaggaacaaaagaccacatatgatacacttccatttgtaggaaatgtatagaatagacaaatcttagagtagattaggagttgcgtacattgtggtgctgcaggtaggcgggaatggggacgtgactgctgatggatacagggcttctttgggaggtaatggaaatgttctaaaattagattgtcctaatggttgtataactctgaatatactgaacaccattaacttgtatacttgaaatgggtgaattatatggtatgtgaataaagctattttttatttattttattttatttttttagagatgggatcttgcttgctctgtcacccaggctggaatgcagtagtgtgatcatagctcactgcagcctcaaactcctgggctcaagtgatcctcctgcctctgcctgctgaatagtaaagctatattttggggggaaaagggggaaacagctcctgagtttgggggtgggctcccagaatataccagcttactgaaagcgaggcatcgggagagaggcctggaatctgtttttaacaagcccagcaaatgaggcatcattaagtaggtcttagaaatacactgtcatagagaatacttttatttttcttttacattgtaaagtgggatagggtaggattaatacattttagcttacgtttttgccacaggctaggtgctgtggaaatacagtatcctttgatgacaataatgacagtcttcaaagtgagcggtgtacattcttccagaagtttcgcacttcctgcttctgaagtgcagtgccctagagagcctcagacccatccccagggcccccattcactgcagccactatcgtctctctccctatgcaggtgctgagacagaaataagggctgccagcaccacccagaaactgactatgaaatccccaatgtgtctgaccctttctctttaagactttggtttgcttacatttcattttgttcctgtaagtgtttcttattgccatagcaaccctaatcgatcactggaccaaaaatagctctttcatgttttccaaagcatgtctgtagtgaattggaaattcagttctgccgtgcattttgcatatgctgctttcatttcccgacactgaacctgggagggcttgtgtctggaaattattcttgcagagacccagaaacctcacttgtctttcctggcgttcttcttccccactgcagatccacccgtcacttccaaaagctacaagtagctgcatttaaatgttccaccatcacttttctgcacattgagttttgggtgctggaggttttacaggtaccagaatatcacttttcaataagaggttcatcctggtggattccgttgggtttggaaggccaattatagatgcttagacaccagataaaaggaagagggtcatggcagggagcagatggcagcaacacctataagattcctctggcttacgtggatctaagctagaaaatcaaagatgagatgacaggagagctcctgccttgactccctgacttcttcctaacactgctactgtttttagggggttggggcaaaataaacactggatgtaattaagtgaatattttctatgatgctttctctgctttattctccctgccaagctgtgcctttagtcaagaagagggagagagagataaaaaagaaaagatttttcatgagaaagaggattcgagacctggagtgagcccagaggaggaagaagaggtggagagggacagaaatgactcactgatttcccccaggctccagggacaggcgtgcttttttgcctccccctctgcctgtaagcagagtcatctctgtggcctcaagggttcccaacttctgttttatgcttctgtttcttaacttctttgagccttggttttggcgattgggttgagtgaaccagcggacgtgcaccctttagatctaggaaagaaaagagttcacggagatcctggtagagtttttgttccctgcatgaagtcagcagggggccaagggaaagctcagagaagaggccagtggaaggggcacctgcccagaagaaggagctgccaaggatggagcctgggacacgtggtgacatttcctcagcagcagagcaggtcagggattcagagtgagtctggaagagcccagatctgctctgtggtttggctgccttccttgccatgggaagaagccatcaggtgtcctgtggatgcctttccggaagcctctgcatccttgcatcttcatagtggaggatctgcctttgaccccagctcagctttctcgtccacattgcctaggagggtacaatggagtggaccaacatctctccagcatctgccaggcgctgcctggccctggacattcgttatctcttttcattctcaccccacagctttgaggttgcaattgtctccatttgatagatgaggaaactgaagctcagagggaatcgtgaatttgccccaagtcacacagtttgttggaaaagaagctgcggtttgaactgaagtctgttttactccaaaaatctgtattttttttttttttcctactaaatcatcatcctccctctctgtgggttaggtgcctgctgctgcatctggacaccagataatgacaagcttgctgacatcagttactagtaaatatcaccctgggcaataagcagtggccattgattgacaaagcaggtggcatcataggtggaactaataagtcagaaaaagcaccaattcccccttcccttgcacttgcttgaacctcagagtcggtgatgctttactcagatgaaaaccagatgggtgatttggaagaaggcagccagcaggctgagtgttgtgttggttttctcttgctgtgtagcaaatctcccacaaatttagcaacttaaaacaacacaagtggctgggtgcaatggctcatgcctataataccagcactttaggaggctgaggttggaggatcgcttgagctcaggagtttgagaccaacctgggcaacacagtgagagctcatctctactaaaagtaaaaaaaattagctgggtgtggtggtgcatgcctgtgatcccagctgttcaggaggctgaggcgggaggattgcttaagcccaggaggtcaaggctgcggcgagctgagctatactgcattcaagcctgggcaacagaatgaggctctgtctcaaaaaagaaaagaaaagagaagagaagaaaaataacacaagtttgttatcttgcagtttccatgggtcaggagttggaacccaggctagctgggtccttggctcaggcaactcaccaggtagaaatcaaggcatcaaccaaggttctagtttcaccagaaatgcagggtcctcttccacgctcactggtggttggcaggattcattccttgtggttgaaggacgaaggtcgcgttttctagctggttcttctccggctgtcactctcagttcccagtagacctctcttgggtcctatccacgtggctatctcacaacttcaaagccaacaaaagaatctctgctttttctaaagtgaagtcttgtatacactctcaggagtgactgactgtcttgtctttttgctatcaatcaaaagctgtgctccctctgaaggttctggggggcaaccaggggagtgacagcccatcatatccccaggttctgctcacacccgaagggaaggattacacaggatgtgtgcaccagtggctgggactctggaggccatctcagaattctgtctgccgtgggtttttcagtctttccttcatatgctgtgggccaaatgggactttagacattcagcatttccaaatgactgttccttagagagcacgggatgcttcagcagcccttagacatctttttctgttttagccaatggctgacgaccctagtgtctctcttcttggagcaagttcaggtgtggttacatcagggttcccaacgttttttccacccccacactcctgacagatccctcggtgatatagaatccctccacccaaggacatttatcaggatctttagggaacagcgcatattttgagaaaaagtccagggttggaaagtggggttcccgtctccccattgacattgagaatgactaggttagatggtatattcctagtggaagcaaaagtcttagttacagaaagcattatttgagcaaacctaaactaaaggagatgctttaacacctgaagaagctgggtaaagcggggggggggggtaaagaagaaggggggtgactttgatgaccaccattcctagtggtgctggtattaggggggcaccctcctgttagagtgtgagcttaccacatggttggtgagcctgggacacagatagctaatggtaatggtgacaaaggagatacgcgctgtgataaagggacaaacagaatgctgccagcatgcatgggataatcattccgaagtggtacttgagatggtctttgagtaagatttaggaaagaaatttcgggctgagagtaccatggccaaaaaaaaaaaaaaagacctgacagcaggaagttttccagggaagggggagtggacctacctagatttagggtgggtccaaatccaatgacttttgtccttgtaagaagagaagagagcacagagacccagagggaagaaggggatgtaaagacggaggcagagactggagtgatgcacccactcccggtgccaccaacagctggaagagacaaggacagattctctcccagagtcttcagaggtagtatggctctgccaacaccttggtttcaggcttctggcctccagaactgtgagagaataaattgctgctgttttaagccacgcagtttgtggaattggctacgataattctagagtaccagtacagtcagggagaacattcgcgttcattctggacctttcaagtttgatgaacctgtagggtctttgttggggatggccagtgggcacctggaaatgtgagaggagttggaatttgcgatgttgatttgggaggcatctgccaaaaaagaaaaaaatcatgaaaagtcagaagcagatgagatcaccaggggagagggtttggatcaagaaaagaggctgtaggtagggtaggacctgagggatctcctgtagggaaggagtggaggagggaggaaagggtgaactgctgctcaggatggaggagttgctcagtcatattgcagtgtagagaggtctccagggtgcaaatggaagagtgatgctgctttggaaatcctttgatgatcaggtgggaggtggaaaaagtagagacaggaagcactgaaactgaatactcttttttttttttttttttttttttgagatggaggcttgctctgtcgcccaggctggagtgcagtggcgcaacctcagctcactacaacccccgcctcccgggttcaagcgattcttcccgctcagcctcccgagtagctgggattacaggcatctgccatcatgcccagttaattcttgtatttttgtagagatgggggtctcaccattggccagcctggtcttgaactcctgacctcaggtgatccacacacctcggcctcccaaagtgctgggattacaggcatgagccaccatgcccggctactgactactcttttaataagtttttttatgaagacagaaagagatacggaattgattatagatgggggaagaaataggatcaagggaactttgtgcttatttattttttaagactgtgtctcttttcattatatttttaggctgtgggaaggaagcagggaaaagatgcaaataatcaatgaaacaaggttccagagaagagcttacaaataatttgtactgtgcacctactatgtgccagtcactgtgctggggtttagctgtgtgatctcattgatcttctgaacactcctacagagcggaaaaggattgtccccattctccacctggggcaactggggctgagaacagtaaaataacttgcccaggttgatacatcttggatttgagcccaagtcagctggctctgatgtctcagtgcttttcattatattatttctccactgaaaaagaggaggatatatctttctcggattcacaaagaataagaaacgtaaagaaataagcagatttgtaatggaggaaagggatgtgtcagtgtttctatcatgcagttcatgtcctcattaaactatgactcaaagtgatcagctgcaagggagaggggagaaagggtgaagccaggcaagggaccttgagagggtaagggatgtaggatagatcagtggatgagatataacagggagccaatcaggaagaaataaaagaccttgctttaaagctaagcttccgctaggattagtgggctggatttttggagaaaccagcctgcatgggggaggcagaaggttatcttaacatggacatcacccctgagagatttcagtgacggcactgaagaagcccagagccacagataattctgattttaactcaagacacccgcacaccccaggactctgagaacgagtcatcagacatcccaaggggattatcagccccaaccacctgccgaaggagaaagtactgacccgcttggagttaccaggagctgttctctggccaccctgctgaagccaggtgcactactcctagcctcgtggcaaggttgccattctgatatgaaaataaccaaagtccccactcaaaaataacaacatctgctaatttgcatgggagttttgcatttcataattgggtttaatacgcaaatgctaaaattcatgtgttgggctagctaagtggtttagaggttcagtgggtaaaaactcctcacagtgttccactctggtgcaccgagacccacacccacgctccacaactctgtactctccccactccttggtttgactctcatatgaattatgggataaaaaatacaaaatcgatttacctaaaggcttgtcgtgtctaagagggtctcagccagggcatccccccacgttctcatgtctgctttggggctctgagtcctccagcgtcttcatttgagatgagcagctgctccttggtgctacctgaacccggatataagggcagcggttatggagtgagaagtttgagaggagacagcagagagggtgttaatgaataatcgcagggccttgttctccataaaggcaattactgggattgattgtttccgtgtttccttagtcacggttcagatcccttgtttcactcagattaagacagatgcgtgctgaacgcgtcctggcatgtgatgtcaggagaattatcgatggcacgtcccaggcctctgtcttctcgtgcaggtgccaccaggggtctcagctgggctgaaaggggagcgtggtcattgtgcggctgaagcatgtgtgtgctatagccaggtggttttccaggttgagcatgcctcagcatacactggagggcttggtaaacagattgctgaaccccacctccagagtttctgatttagttggtctgctgaagaatttgcctttctttctttctttcttttctttctttccttctttctttctttctttctttctttccttccttccttccttccttctttctttctttctttccttccttctttctttctttcctttttttttttttttgagactgagtctcactctgttgcccagactggagtgcaatggcatgatctcagctcactgcaacctccacgtcccaggttcaagcgattctcgtgcctcagcctcccaagtagctggaattacaggggtacaccactacacctggctaattcttgtatttttagtaaagacggggtttcgccatggtggccaggctggtctcaaacccctgacctcaggtgatatgcctgccttggtctcccaaagtgctgggattacaggcatgagccaccgtgcctggccaagtatttgcatttctaacaattctgggctgctggagctggtccagaaactcctctttgagaaccactcagtatggtgaagagtatggacactgagacctggccacctggctgcatgagactgtaggccatttacttaccctctctgcacctccatctcctcatctttaaagcagggggggatggtaatagtacctccttcacgggattgttgccaggaataaatgagtgagagcatcagagcatttgtagcagtgtctggtatagacagtatgtgagtactggaatcatgtataagggatccagcctcttgggactgtgatgctatcaggccaagtctggtttccccaacacccacagatcccaatgcaggtgctgggtcattttgcccattagccgtcaatcccatctctggtggccaagaaagttaatgcccagcttagggctagctagagcgtggttacaccaacatccatcaaaattctcttcttaagccaccttaacccttcacatctactgaatgcataggacttgactcagcgagactggggctgtagggctgggttgcatttggggtttctgtccctcgtgtggacaaagacaaagacaggggctgccttttctggttcagtttctacccatggatgctgtctgctgaatgcattcttgctgcccagtattatacatttttaaaacatcattttattaatatttaaccctcacagtgttgctcttaggtaataattattactcctgttttaactctgttggggttcagagaagttaaatgacttatccaaattacatattaaaagccaggtctcgcccggatgcagtggctcatggctgtaatcccagcactttgggaggccgaggcgggagaatcgcataaggccgggaatttgagaccagcctgggcaacagagagagacccttgcctttaccaaaaaaattttaaaaatccgccaggcatggtgtcacacacctatagctgtagtcccagctacctgggaggctgaggtgggaggatcgcttgagcccataggtcaaggttacagtgagctgtgactgcaccactgcaccccagcctgggtgacaaagtaagactctgtctcaaaaataaaaataaaaagaaggccgggcgcctgtaatctgtaatcccagcactatgggaggccaaggtgggcagatcttttgagctcaggagttcgagaccagcctggctaacatggagaaaccctatctctactaaaaatacaaaaattagccgggctacacggaaggctaaggcatgagaatcacttgaacctgggaggtggaggttgcagtgagccgagaccacaccactgcactccagcctgggcgacagagcaagaccctgtctcaaaacaataaaaaataataaaatttaaaaattaaaaataaaatttaaaatttaaaataaatttaaaaattttttttattttactttaaaaataaatttatgttttaaaaattaaaaataaatttatgttttaaaaattaaaaataaaagccaggtctgtctgacttcaataatctatgactttaaagttctactatatccccttgctaatgttatatgagcatttatataaagattaaggctgggtccccaggaatccagcaatggtagctgctccccaaaagtaagctcaccagaactggaactggcgtgatttaggggtttgcttttctaaagcttatgctaggagtcacagaacatattccttttggaaatgttctcttcagggacttgccctctactgctggttattctctgtggcctgacctctgtctggatgaaactgtgttcattgtcctaaaggcggctttcctttgtctgaatttggatattgacttagtatcttaacatttctgttccgggacggtgcttgcaaccaaatggccaggaaagtattcagaagctctgctgaatataggaagagagaaaaaatgttatgctaatgaaaatttgcttttctcccacagtgttcctttctgccgaaattctccattcatatagaaaccaagtatgaggacaacaaaggaagcaatgacaccgtgagtagcccctccttccatgctgcgctcgcctcgtgggctctgaatatcacagcacttctcacagcccctctgtgaccagggccagcagtgggacctgtgcctgggacctcagagatgttctggcctttggcttctgagggttatttccctgggacttttccctggaattcttttgttgtctagcttttctttcttctcatttttatgtactttccctgggcctctgagcagaagcctctgacctggggtgattgtcatggaggtggagaggatgacagggcacttggaactccaagatttggtttttgatcattggacagagtacacatcttctcaatgcctattaatatctacttcggaaagggaatacaatcaaagatatgtgtacacagaaaaggaaatacagtcagatgtatgtgtgaacagaaaaggaaatacaggcctggtgcagtggctcacgcctgtaatcccagcactctgggaggctgaggcaggcacatcacctgagatcaggagttcaagaccagcctggccaacatggcgaaaccctgtctcgactaaaaatacaaaaattagctgggcgtggtggtgcacaccagtaatcccagctacttgggaggctgaggtaggaggattgcttgaacctgggaggcagaggttacagtgagccgaggttgcaccactgcacttcagcctgggccacagagcgagactccatctcaaaaaaataaaaaaagagaaaaggaaatagaatcagatatgtgtgtgcatactgcatgcatgcttacttacacacatgcggtgtatgtatacacccacacatcctaccttaaaatcagggggtacccccacaaaatatttacctcctgaggcattctgacttttactaaatttcagccaagtattttgcttattagtgttgggtaaaacccatcttctgacctggcttttacccccaggctctttctgtttgggcagtaaatttctaacttctcttttctttgggggtgactgttttgacctaccaaaagcctcacctgggattaggctgtgggttccctcaggacccgttgaaaggaagaacctggatctagaagcttcggggcttccccagagttcatggaacttcccagaggagagaaaaatacagctggcagcagtactatcctaccactctgttcaggaaccccatcgttagtgtctccttgaagtggcagcccaatgggaaatgtttagggccattttcctgtcacagcctgaaatcacaggcgcgttgctggccaaattcatcaaaaccaccatgcctaaaacagtgtcacactgtgtttcaacttgaatccttgtaaaatagtgattttttttttttttttttttttttttttctgattagaaagcagcctgggcgcggtagctcacgcctgtaatcctagcatgttgggaggccaaggtgggcagattgtctgagctcaggggttcaagaccagcctgggtaacatggcaaaaccccatctctactaaaaatacaaaaaattagccgggcgtggtggcgcatgcctgtaatcccagctactcaggaggctgaggcaggagaattacttgagcctgggaggcagaggttgcagtgagcgcagatcgcgccactgcactccagcctggcaacagagcgagactctgtctcaaaaaaaaaaaaagttaatacatggctattcaaacttggagaatgcaaaaagaaagtattgaaaaaagaaaggaaaaaccaatagcaatcccacaatttagagatgacttctgttagcaatttggttcatgttgcagattatggacaaatttattttttaaccaattcctcctgaattgaatcatatagtatgttatttttaacatgccctgaagtatgcttccctataatgatttttcctggctgtaccaccttccatatttcagtgtacttctttaaacaattgctggtcactggatattgaagtaagcttgactcttttcacgtagctgtggactctcatgaaaaggataataaagttcagttgcttgaattgcttttcctggcataatatgaaaatatgggggaattttttttttctttataagacagggtctcgctctgtcacccaggctggagtgcagtagcacgatctcaggtcactgcagcctccacctcctgggctcaagcaatcctcccacctcagcccccctactgggactacggcacacacaaccgtgcccagctaatttttgtgttttttttagagacgtggttgtaccatgttgcctaggctggtctcaaactcctggactcaagcaatctgcctgtcttggcctcccaaagtgctgggattacaagcgtgagccaccatgcctggctggaaaaaaattttttaaatatcttttagtctttccaaacaaatttccttgctttctctctttttctctatgcctctatctccatgagtttattcaaaacagctctccatttgaagaggtgtagagaggccaggtgctatggctcacacctataatcccagcactctggtaggctgtggtggacggatcacctgatgtcaggagtttgagaccagcctaggcagcatggtgaaaccccatctctgcaaaattaaaaaattagccaggcgtggtggcacacacacctgtggttgcagctacctgggaggctgcagtgggagaatcgcttgagcccaagaggtcaagcctgcagtgaaccatgtttgcacctctacactccagcttgggtgacagagtgccacctaaaaataaaaaagaggtgcagaggggacacgtggcctcactgtgatccctatagattggtgggaccactgtaatctggtttatcctctgcccagttcaaatcatccccaaaattcatatggttattgtgtattattatacatccttttttggcaggtgctcaggttttttgactactctcctaggaatttaaaataacaggttatccaccttacaatcaggatccaggcccatgccaagggccaggcccctttgagacttaggctgggctgcaagagaagcacctatcacctattcactctgtgcagtccttggacacagtttgcttcctctaggagaaatctcagctgttgtagcctggcttgcctccctctccccagaatgtggactctggaactgcccaggggacctgctgcttgtctgcctgtcatggcacccaacttgcccaagccccagtcctgccatcttgttacactaaagaggccctaaatgtgtttttggcccagttgccaccccctgccccccaggctctgcttgaccctgctccacggaccccaggtcttgctcctgaggccattggaccacacggcccagccccacttcattagacttctttgccaatttgccctcctctgttttacatattcagcggctgttggttgtccagcagattcaaagttggtcccagaaaggcagaaaaggagcgttgcgccgaggcacggtggctcacgcctgtaatcccagcactttgggaggctgaggtgggtggatacctgaggtcaggagtttgagaccagcctggccaacatggcgaaacctcgtctctactaaaaatagaaaaattagctgggcatggtggcgtgcacctgtaatcccagctactcaggaggctgaggttggagaattgcttgaacccgggaggcagaggttgccgtgagcagagattgcgccactgcactccagcctgggtgacaagagtgaaactctgtctcaaaaaaaaagaaaagaaaagaaaaggagggctgcatccgtttccattcatacttgttaatacttcaaaatctgaacataagaagtatatatttatctaacaattctttaattactaaacgctagctttatctagccagggattcaaaactggtgttttaagccaaggagtgtgctggtgtgctctttttctgtcctgggttgagtgtggagtttttggtgggaggcagagttgctaaggaaagcagtgcagtagtggataattctcttgtctcaccgcgtttccaaactatttaataaactcagttcatttctttgcactttctgggtgtacactcttatcattcagctaccatccttcatactgctatctgcactgtttcctcccctacctgccaaaaatttaatgaaattgatgacgataagaagcaataattaaattgaaagaggctgctgatagtcatattgatgatagtggttgaatcgagtacatgttgttatcctattatcaattaccatataagtaattttttgacgtgacccaatatctagtaaaaaaaaaaaaaatagtggcagtatgagtaaatatcttccttgttaaaaataaaaccagtatacgtatgattgtgaaaacctgcaaactgtgattacattaaccaggatgcaatggggaagttgtcttaaactgaggcccatttattttatgcacatacttatgagaattacttgggccttcattcgtgctagggaggacggcaccgtgccaaggtaaggttccgttgtttatccaaggccataaatctaggcctgtgagagtccgtgcttagcactgcctggttcagctgaatgagaggctgcccatgtggtgacggctgccaggttactggtgttcaatggggttaatgggggcagccttgctactttacttcctcttccaaacaaagcaggcaccatttaaagcagtggttcccagccttggctgcacattggattcacctgagaagttttaacaactcatgcctgggtcccagcccctgggattttatttaatgggtcctgggcgcaggctggtctaaaccagccaataagcatgaaggacagaacactcacttccagaacaccaaattctccagctggcagtgtgtgcagttttagagtctaccctgaggctgaacctgatatgttccctcaggagacattggctatgctgtccccacccctgagagggtctagaccagcagttctcaatcacagctgcctattaaaatcacctgggccaggcggggtggctcacacctgtaatcccagcactttgggaggccgaggcgggaggatggcttgagctcaggagtttgagaccagcctgtccaacatggtgaaacctcgtctctactaaaaatacaaaaattagctgggtgtggtggtgcatgcctgtaatcccagctactagggaggctgaggcaggagaattgtttgaatctgggaggcggaggttgcagggagccgagatcacaccactgcactccagcatgggcaacagagcgagactccttctcaaaaaaaaaaaaaaaaatcacctgggaagatttagccatcactgatgctgctgtcccagccctggggattctgatttcattggtctgaggtggggttgaggcattgggattctttttttttttttgagatggagtctcactctgtcacccaggctggagtgcagtggcgcgatctcagctcactgcaagctccggccttccaggttcacgctattctcctgcctcagcctccagagtagctgggagtacaggcgcccgccaccacgcctggctaattttgtgtgtgtgtgtgtgtgtgtgtgtgtgtgtttgtgtgtgtgtgtgtttgtgtttagtagagatggagtgtcactgtgttagccaggatggtctcgatctcccgacctcatgatccgcccgcctcggcttcccaaattgctgggattacaggtgtgagccaccatgcccggccggcattgggatttttacagttcccccaggtgaatctaaggggcaacaagactgagaactatagatttaaagaaatagtaagtgctatttaaaaccaacacttaggaaaacaaatgttttcactcctttatactcctggaaaataggacagtttacaaaaggcatatgtaaaccccactccattccactcccactcacacaataaaaagacctgggtaacatatgtgttctcattagccacatatcaccaaggacattatttcttggcaaagaaactcctctgataaaatgaagagaatgtccagtttagttcctggaaacatgaagctctgtctttcacaggggtctccttggaagctgcctaaaagaagtgtctggaatgtatttcatttctagctcctctgtgtggtaatgaaagaacacaaagttgttctttgtgaaacagaaagatcagtattgaagttccagttatcaccataagcctaaggcttggtttctttatttaaaaaaaaaataggataaataatgcttccatcagggtgtagaggatgcatagaggttcatttacatggaagcacttcataaactgtgaagtgccatgcaaataagagacatgattactgtgatggccacacctcgggattaactgcactcatgatgatttcccaatgagactctgattttgtctcaagtgtcaatgaaccatttgctgttcaacaagttttgagcacctactatgtcccaggcattaggagaaggatcggggatacagcattaagacaaaccagccctccaggccggttgcagtggctcacgcctgtaatcccagcactttgggaggcagaagcagccagatcacctgaggtcgggagttcgagatcagcctgaccaacatagagaaaccccatctgtactaaaaatacaaaaaattagctgggcatggtggcgcatgcctgtaattccaggtactcagcaggctgaggcaggagaatcacttgaacctgggaggcagagattgcagtgagctgagatcgtgccattgcactccagactgagcaacaagagtgaaactccatctcagaaaaaaaaaaaaaaaaaaccagacaaaccagccctccattaatcatggagtaggggaagcagataataggcaagtaaacaaacaaaagaattgcagctgtgctaagtgctaggaaagctataaacagactagagggagctcagcctgaggccatgtggtcagaaaggcccctcagaagacacaagtccacttgaggcttgagtatgggaaggagccagccctatgagatatatgttcccccaccccaggttcatacgtggaagctttagaatgtgactgtgcatggagacaggacctttaaagaggggattaagttaaaatgaggccattagagtgggtcctaatccagtctgactggtgttcagataagaagagaacacttgggcacataaagagactctaggctgggtgtggtggctcacagctggaatcccagcactttgggaggctgaggcgggcggatcgcttaagctcaagagttcaagaccagcctgagcaacgtggcaaaaccccatctgtacataagaaatgcaaaaactagccagatgtggtggcacacacctgtagtcccagctactcaggaggctgagatggaaggatcacttgaacccaggaagcagaggtttcggtgagccaagatcgtgccactgcactccagcctgggtgatagagagagacgctgtctcaaaaacaaacaagcagactctttgggtgcaacacgtgaagacgtagggagaaggcagccatccgcaagtcaaggaggaggtctctgaagaaatcaaccctgcaggcacattgatcttggactttcagcctccagagctgtgagacaattaattagattttgttgtttacaccacccaatctgtggtgttctgttatggctgaccccacaaactaatgcagggagcaaaggccctggaccctaacacagcctcacatattccaggaactgttggaaaaccactggctagagcattaggagtgagaataagtagactggcaggaactgaggttgaaaatgtagtaaaagctagatcacgcaagagctatggggccatggcagagtgtggatttcagtgcagtgggaacttattcaaggattttaaacaaaggaataacaagatactgttcgtggagttttttaaaattttttatttggggataattttaaatttatactaaagttggctgggtacagtggcttattttccagcactttgggaggctgaagcgggcagattacctgaggtcaggagtttgagaagaccagcctggccaacatggtgaaaccctgtttctacttcaaaaaaaaaaaaaaaaaaaattagctgggcgtggtggtgcatgcctgtaatccctgctactcaggaggctgaggcagaagaatcacttgaacctgggagacagaggttgcagtgagccgaaattgtgccaccgcactccagccggggtgacaagagcaaaactccatctcaggaaaaaaaaaaatgtatactaaacttgcgaagattgtgcacagggttctcaaataccctctacccagtttccccttacctaaccatgattccactgccaaaactacagacttcattcagatttcaccagttttcccaataatgtacttttgcttctgttccagaatccagattaggacaccccattacattggttgatttatgttttaaaatgtttgctctggctgttctgtggagaattagtgaaaggcaagactggaagcagggagtccagttggtaggctattggaatgatccagaccaagatggtggtttgagctggaaagatggcagaggataaagaggggaggaagggatctattttgaaaacagagtgactttctgttagaattgatgcggggcatgagaggggaacaaaatagggatgatctcaggctttctagctctgcctagtgggcctgggtaagtggtggtgccattgccatcatgggaaacagtggaggagaagcaggttctgagaagaaaagcaagagcgccatttagtcatgatgactttcagataccaatgagactgccaagtggaaatgaggggtaagaagttggatattggccaggtgttgtggctctcacctgtaatcccagtgctctgggaggtcaaagcaggaggatcgcttgcacccaagagttcaaggccagcctgggcaacatgttgagacccccatctctacaaaaaaaaaaaaaaatttaattagctggacatggtggcacacacctgtcatcccagctactcaggaggctgaggtgggaggatcgcttgagcccaggcagtcaaggctgcagtgaaccatgatcaagccaccatactccagcctgggcaacagagcgagactctgtctcaaaagaagaagaagaagaagttgcatatgcatatgaatctggcattcagagagggatgtgggtcatgatttttatctagggagaggagtgacagaaaagagaagtttctagatgctccgagatagagattgcccaggtcctaagaaggaccttctgatggcttccaggtccagcttctcgttgttatctttattccttggttaagactaattttcaatcactgggctgtgcttggttttaggaaataaacgatctcattaatttaaccacaaagatttacttagagagatctaatttctccccctgggtgcctccttcgggtaaattgcataaacatctcaatgtcttgactgggctcaacttgcatggctttggagagaaatgttctcttcctgactacaagtagcttcccctggaagttaccagctgacaaagagggaattttagcatttcaggagagctgtatttattgaggcttgctatgacaatagccatcgtgaagtttgttttctttcttttttattttttgaaacggagtctcactttgtcacccaggctggagtgcagtggcgtgatctcacctcactacaatctctacctctcaggttcaaacgattctattgcctcagcctccagagtagctgggactacaggtgcgcgccaccacacccagctaatgtttatatttttagtagagacgggatttcaccatgttggccacgctgatcttgaactcctgacctcaagtgatctgcccacctcggcctcccaaagtgctgggattacaggcgtgagccaccgtgcccagccgtgaagtctgttttctaattagcacagtagtccctgcttctccgaggtttcactttctgcagttttagttccctgcagtcaaatgcagtccaaaaatattaaatggaaaattccagaaaagaataattcctaagttttaaattgcatgctgttttgaggagcaacatgaaatctcataccgtcctgccccaccccacccagggcacgaagcctccctttgtccgtcaactctgctctgtatatgctacacgcctgttagttacttagtagctgtctcggttatcacatcaaaagaaaaaaaatagagcgtgtatagagtttggtactatctgaggtctcacacatccagtgggagtctcagaatatatccccctcggccaaggtcggggacaactgcatttgtatttgtaactccaagaggacaacatagatggatggatgttaacacatttcaaaatgtactaaaattaatttgtaaagcaggagtgccagtgggaactgcagaatccatatttacaggtctctggagctgattatctcttccttaaatggcttctaattgaggattacagaaagaaaaaaagcatttgctttatttttagacgtgatctctgatgtcttcaacttttatcgttctgtttttaaccttagattattataaccagccacctacaaaatctgcaattttctctaataagtcagcacctgttaaaaaggaggttgcacaaaacactcccatttgcagtttggaaggattattatctgctttggtctgtgaagtggaaagtcaatgttcttattcaatctgtgtctaatggtgtcattttgaggacaatggaaaacagatcatgtttgattccttaagatgtggccactgctatttgtggtacaatttgtgatctgagagctgcatgtaaaaaacacatgagcaaaaagaatatccagcacacaagggctggctttctgattctcagaggtatagtgacaacacagcttacctctgcattcaaagaagctagaacttaccgcggataatcattagtagaagacagcttaaagtagtgtctgctttctggctaggcctgattcacaggtgctgtgataaattcaaaaagacctgcctcctctgatgtgctagtatcaagggtgagggagacagttaaccaaactggtcaaaagcattgtcagcaaagacctggtgctgaatcatgttgggaaactggagtttggagctagagaggcaataccaagtatcaaggtctgaatgtccactttgtaaccactgtagtaataattgactcaaaaaaaaaaaaaaaagccatcaatggatgctaagaccgttgagcaaaacaagtattgggtacaggatatatcaccaccaatgctgggtgtgttagctcacacctataatctcagtactttgggaagccaaagtaggtggatcatctgagttcaggagttcgagaccagcctggccaacatggtgaaaccccatctctactaaaaatataaaaaatagccagacgtcatggcacatgcctgtaatcccagctactcgggaggctgaagcaggagaatctcttgaacccaggaggtggaggttgcagtgagctgagatcataccactgcactccagcctgggtgacagagtgagactctgtctcaaaaggaaaggaaaggaaaggaagaacaggaaaaaaaagacatgcagagaggacaaaccagaaaataatgagattggctacctacagtgggggtgtgtggaaacggggtagagatggtgagagaagcactacctctgggagtatacctttttgaatcattcaacttttgaaatcatgttaatgttttccccactcaaaaataatgaaaccaaatcaacagggattaggcagggggttggtggggtggaagatactaaaatagaattaaaacgaaataaatgaacctaactgtattttaaaagaaataaaatagccacactgaaaaggagagaaaaagacctttcccaaggaattctcaattacacagcactctgactatgtatcctcagtcggaagacaataagaattgtaaacaaatactgaattctaagtaataagtttgtttcttactgtagtatgggctaatactactgaaactattttttgtgtaatttaagtttgagcaaatacacaaccctagggcctacctgtagaagaaaatcaccatttgcaactatcataatagtaattgatttagtagtaaacatcattgaatgctaaaactagtatgtgaaaagtttgatgaggaacaggatatttacatggactaagagtatttctctgcaagtgacttactaatggaaaatggaaatagaaataattttacaatagacagccaggcacagtggctcacacctgtaatcccagcactttagcaggccgaggtgggtggatcacctgaggtcaggagttggagaccacggtgaaaccccatctctactaaaaatacaaaaagattagccgggcgtggtggtgggcacctgtaatcccagctactggggaggctgaggcaggagaatcacttgaacctgggagatggaggttgcactgagccaagaatgtgccattgcactccagcctgggcaacaagagcgaaactctgtctcaaaaaaaaaaaaagaaagaaagaaagaaagaattttacaatagacatacctggtgtataccaccttaaccaaatgtctgtaacgttatcaatcctggaacaaactagcatcagaaatgatatgatgtgctgaaaaagacgcatcacctctttagtgttcttgtcaaaaacaaacaaacaaacaaacaaacaaaaaacccataagctaaatctaatcataaggaaactttacacaaactcagattgatgggattctataaaatagctggcctgtactctccaaaattgttgaggtcatgaaagacaaagaaaggctgatgaattattttagattaaagaagactaaagagatgagactactaaatgcagtatgatcctggactggaacctaaactggagaaaaagagcccaaaggatattactgggtaatcggcaaaatttaagtagggactgaggattagataatagtattatatcaatgttaaacttcctaattttgatcgttgttttgtaatcaggtgagagactgtctttattcttaggaaattcaccctgaaatatctagaggtcaagggacatatctgcaatgttttctcaaatgtgaaagacaaagcaaaagaagcaaatgttaacggctggagaatctgggtaaagggtgttcagggattttctgatatttcttgattttttttatattcttgcaattttttgacatgtttgacattatattaagatttaaagtcacaattatttattgatttaaaaatttttttgggagacagggtcttgctgtgtcacccaggctggagtgcagtggcaccatcacggcgtactgcagcctcaacctcctgggctgaagcaatcctcccacctcagccttcttagtagctgggactacaggagcacatcaccatgcccagctaattttttttttttttttgtagagatgggcatctcgctgtgttgcccatgctggtcttgaactcctgggctcgaatgatcctcccaccccagcctcccaaagtgctggcattataggagtgagtcaccacacccagcgcaatgattttttaaaattaaaattgaaagagcaaaaaatggtataaggaatgtaactaaagataaaagaattttgttataggcagacagtgtgtctaaactgaaaacctaagagaatttacaaattatcttaaatagaatactaaatagttaaaatgatagcaaaatgattatgttcagaagggttactggctatcagatcaacttacaaatatcaatgatattccatatatgagtaataattagaaaatattaatcccatcatcaatagcaacataacattaaggtacccaagaacaaatctaacttttctagacgaaattattatcaaaggacctaacaaagacctgaacaaattataaatactccatgtgcatggagcaaaagactaaatactgtaaagaaataagtgatttcctaaatcagtctccaaattaaatgtaattccaatcaacatctcaacaggattgtcataaattgtaaaatcagatggaaaaataaaagtcaaaagatagctgagacaaattttgaacaaagaacaaggaggcgaagttcatcatatctgataacaaaatcatatgaaagaatgtggtatttgcacaaagatagaaataaacgtaagctgatcatgtgaatttgatacataatagataatgtgtctccaatcagtgggaaggaaagataactttctcagtaaatgacattaagtgagttgacatttcatagggaaaactaaaataataggctggacacagtggctcatgcctgtaatcccagcactttgggaggccaaggcaagaggatcacttgagtccaggagttcaaggccagcctgggcaacatagctagaccccatctctgcaaacaataaaaataattagccaggcatggtgatgtaggcctgtagctccagctacttgtgagactgaggcaggaggatcacttgagcctgggaggtcaaaactgcagtgagtcatgatggcgctactacacttccatctgggcaacagagaaagaccctgtctcaagaaaaaaagaaagaaaagaatggatccctacctcactccatattcaaaaataaattccaaaagtgtttacaaacctgaccatggaaaccattaaaatcatttaagaatatcttatttatggatgcagatgcatttatatgttacataaaatacaaagtttattttaaaatgtggactaagttcacaataaatttatgatagctgtcagccaggtgtggaagaggaagggatttcaactataagtgtgaaattttctcttttttttttttttaagtagggacagaatcggaatcaaatatgacaaaataattacatatgtttgactggtgggtagtggctgttttttggctttttgattttttgttttgttttcttttttagatggagtcaccctttgtcacccaggctggagtgcagtggtgtgatcttggctcactgaacctctgcctccagggttcaagcgactctcctgcctcagcctcccaagtagctgggattataggtgcatgccaccacactatgctaatttttacatttttagtagagacgaggtttcaccgtgttggccaggctggtctcaaactcctgggctcaagcaatctgccctccttgaccttctaaagtgctgagattacaggcgtgagccatgttttttatatgattttttatattcttgatattgatcttttgagttttgaaaaagaaaatattcatctgagtcttctgttccatgaaactcaaacctctttaattctttgtgatccactgttagcctcagtcactggctctgcagttgtttcccaaatgtttggctccttttccccctcataattactgtgggaatacagtgtacgtcacttaaaaaaaataaggcacagctttgctgtttatttacctagagctttgtgtttatgtttgttgagtccagtggatggtgccttggtgggtggattgctcatgacagaggatggacagcaatcttgggtcgtggagcattttggtggagaacacttgaggaatctgccaaaagctagcagctggtcaggcccagttagtaggattctgtactagaatcagagaaatcaccagccttcgaccaaatagggtccaaagcagggctctgcagccaagtgataacgggacttcgctgttctgaacttccccagctgtgtaaaggggaaaatggcacccacttcagagagaattgagaggatgcagtgagatgctgcatgtcaaatgcttcataaaccatagttctcttttctctttcacttcagttatacctcatgggaaccacttcagagtggactcttggagatccacaaatggggaagtcagtgtaacttggggagtccaagttctcacgtttctgaagtctgcagtccctattcctttttcaccacccagaggcatcctcagacatgagttgataagtcacgtctccagggacttttgagttcactttttcaaagtggagaaaggagtggttactggtgcaagcagcagaccctctgccttgtggcctcctgcttggaggttggggattctggtttcagacacagtccttccttgggttttactcatctgtaagggatcctgcttggcacagctctgttccaagaggtgagagccatctatgctgttgttcccagttaatcatcaacagaaccgtggcagaatggagacaggatgaagactgtaggcactagagtcaaaccaggtgtctttgaatcccaagtcaactccttagcagctagttaagtcatgttacttcacttccgtgtgcccctgtcaaatgagtatcatgatagttcccactcatagggtacttgtgaggattaaatgtgttaagcctgaaaagtgcacagaatagagctttgtacacattttagacattcagcatgttttaacacggccattgtttttcatgttttaacaactttacaaatgaaacgcatattagagttgatggcatgttacaattacaagtggcagcattttttctttttcggtggtatagttggtggcatcttagaatcaatgaattaattcagcatgatatctccttttgcataggatattgagatgtacatcatgagtgcatttcagtactgaatagtgtttgcatatcaaatgtgaacactgaactgaattctgccaaagtcaagtcattgaataataagctattcagttgttcaggcctggaaggttgtttgttaactttttccagggcactggctggcttcctaataatgcaaatgacttgatagaactctgaaaagggaaccattgaatcttcttccccttggacatccagagccatcatctttataaaatggatttcttactaaaaatccctggatgccatctatctgatacaccttcaaggacaaagtctcagctagtattttagtttttttttttttttaatgtggggcaaggggataataggagctgagcttacagaaaagaagttaatgatttccaatggacatgatttcaaagcaatttctgccttttgatgcgctgaaatcattgcttccatctgctcccctacttgtacacagggctctgctttttaaccatgcagtgtgtcagctgttgcccaccaaattctgcacttgatcttctgagactgatggcgattctctatgaataatattaagctattaaatcacatttaaatcctatttctccactaatacctattgaaggcctgtttatattccatcagatttttatggccatttggtacataaatttgttaaatataaacttcatggagcttcatctgaaaatgtttcatcttgttcccagtcctgtaaagacatggtcataaatacctttggactatgcaaaccattatctagagtaattttaattatctttagctatgccgatcagatgataataaatagatgttgaaaagcatcagcaaaatgccatcatggaagagatactcaggggtaaaaccaaataattgaccatttggtgctgaaacattttattatcattcctacaaaggttcagaaatctatcatgagattgggtttgttatgaactcaacatcaccttggttgggatgtcaaaactagagtaaattattgaaatgaaatatgaaacatattaaggaacgtcctcgggaatgaaggacactggaaagactgaattttctagtaacttaatttcgatctatgggtgaagctttgttttcagcacccagctatatttgcttggaaccatctgggtctcttggaatagataatgttaaaccagatacactagttgtacacgtggtatgtctttattgggggcttttggtaacagtttaagatagaaaaaaaagtattgctttaaaaaaaaagtgatccttggtactcacgggtaacaacattctgctttggctaagagtttacgtaactgcatactgttccctatttctttgttgttgttgttgttttgtatttttgttgttattgtttttcttttgagatagagtctcgctctgtcgtccaggctggagtgcagtggcccgatctcggctcactgcaacctctgcctcctaggttcaatcgattctcctgcctcggcctcctgagtagctgggattacaggtgtgagccaccacgcctggcttgagagatggaagatcagactcgatttgctcatgttgttcctaacctttattctaaactgataaaaatgtaaagtcatctgatttcaagactgattgttcccttgggtgttccttaattccctagaggccgagtaaattcttatggtttaaaggctcttcccccttgcttttctatactcccttgggtttgtttttaaaatgatagtgttctgaaccaatttttttttttctttttgagacagagtcttcctctatcacccaggccgtagagcagtggcacaatttcagctcactgcaacctccacctcctgggctcaagtgatcttctcacctcagcctcccaagtaactgggactataggcacttgccaccatgctcgcctaattttttaattttttgtagagatgaagtcttcctatattacccaggctgatcttgaacccctgggctcaagtgatgcccccaccttggcctcccaaactgctgggattataggcatgagccaccatgcctggccccaaataatttatataagccatttatcatagttcctgacatatcatagatgttcagtaaatatcaattatcttcctcaggctgagcatggtggctcacgcctgtaatccccgcactttgggaggccaaagtgggtatcttacttgaagtcaggaattcgagaccagcctggccaacatggcaaaaccccatctccactaaaaatacaaaaattagccaggcgcggtggcacacacctgtaatcacagctactcaggaggctgaggcaggagaatcacttgaatacgggaggtggaggttgcagtgagctgagatcatgctgctgtactccagcctaggcgacagagtgattgagactccatctcaacaaaaaaaggaaagaaaaaaacagttatcttcctcaatccctttgtgttaagttcctagtggaaatttgagaagtcctttattttacatttaaaagataggatgcttttaatggtgccttaattcatcgtacaagaaacatttgttaaacatctattcggcaccaggggttgttaggctggtggaagggacaggtactctcattgcaaggcagtggggtaggctctatggagaacacatgctagagggtgagaatgggtagacaggcaagatcgtgatgcagggagagactggtagagaacacaggagatttttgcagtagatcagatgatagagaatgcagcccgagatttaaagcagtgacagtagaaatagagaggagacgctgggtgcggtggctcatgcctgtaatcccagcactttgggaggccgaggcaggcggatcacgaggtcaggagatcaagaccatcctggccaacgtggtgaaaccccgtctctactaaaaatacaaaaattagctgggagtagtggtgcgtgcccgtaattccagctacttgggaggctgaggcaggagaatcgcttgaaccagggagtcggaggttgcagtgagccaagatcacgccactgcactccagcctgagagtgatctccagcactccagagtgagactccgtctcaaaaaaagaaaagaaaagaaaagaaatatagaggagagaattaggaagacagagagagattggtgcctagttaggatggagcaattagctcagtggtctgagataattcaggtttttgtaacgaatgggtgttcgtgctaccaactaaggcgaggaattttttttaagtggtttaggagatgccatggtgcccctcacccccaaattcctatgttaaaatcctaatcaccgcaaggtgatggcattaggaggtgaggcctttgaaggtgcttaggtcttaagggccccagagagaccccttaggttttaagggccccagatagaccccttgtcccttctaccatgtgaggacacaactagaagttgctatctgcccaggcatggtggcttatacctgtaatcctagcactttgggaggccaaggcaggcagatcatctgaggtcaggagttcatgaccagcctggccaacatggtgaaaccccgtctctacaaaaaaatacaaaaaaattagctgggcatggtggtgggcacctgtaatcccagctacttgggaagctgaggcaggagaattgcttgaacctgagaggtggaggttgcagtgagccgagatcacgccattgcactccagcctgggtgacaagagtgaaactccatctcaaaaaaacagaaagaaggtgctatctatgatccaggaagtgggtcctcacctgatgccaaatctgcctcgatcttggacttctcagcccccaaaactataagaaatacatatatatatatatatatatatatatatatatattttttttttttttttttttaccatgttggccaggctggtcttgaactcctgacttcaggtgatccatccaccttggcctcccagagtgctgggattacaggcaagagccactgtgcctggctaagaaataaatttcttttgttcacacactacccagtttatggcattttttaatagcagcccaaacagactgagacacgtgaggttgatgaattcagtttttgtccagttgagtttgaagtagtcacggaaaacttagtgaaataaccggtagggaatttggtatataaatccaaagccgagacctagagatacagatttggaagtcataaacgtagttttgaaagcatgagaacagaggatattacccaaaggatacatgagggataaaatgaaaagaagggcaaggatggaacctgggggaatattgacgtttaatgggagggaaatggaagagcatctcatagagatggatgagaaaggagcactctgagagttaggagaatcgggatgcctgggagtcacaaaggcccaggaaagtgagaacaccaaggaagaaattgtcaccagtaacagcaacagagttccgtgaacacagaatttaaaaggtcctgtgagaatgagcaataaggtcactggtgacctttatgaaaacgagagacatggtggagttagaagccagcttgtagtatcctttgatgcttggctgtagaaggaaggaaaagaattggatcagaaggggacttagagtggaagggagaagcctttgcaagatttcccatctctgtggaaaagaagttcatgttcgggtgtatctcctctgttccaaacgcatagcagtgacagataaaatacaaagagagaaagccaaagtgatattgctggactcgtggatcaaaaactcggaaggatgagggtagcctggattgactggaatctgggtcttggggtcaggcaggtattgatgtaggtcttttatggcaataggactaaaagtactcaatgcaagctgggccaccagagccagggtcactgtttgaaaaaagaggctggaggtaggcctccccaccctcttttcattctttcaggtgaaaggaacctgaaaagaatcccctgtgtctgatgcctgggccatggcttacagtagtagttctgctcttagaaggcaactgtaaaacctagagattggtgtgaggagtcagggagtggaggtggagaaaaaaaagcagcaacagtgacaataacaacaaagcctcccactcaaaaacgaccccgcaaatctaacattaatgaagacagccaaggtatcaacagtcagaatgtaaatctactgccgaagaaaataactttgtagacagacctgattaaaatagtatattcgggctgctcagagggaaaagtaaaggaataatgttcattttaaaagaatgagaaattaggaaccaaaaaagaaacaagaacagaggatttgaaaaagaaccagtttgaaattcagggactgaatcattgaaatgaaatctaagtggatcagataaactaggctagatacaactgaagagataattagtgaattggaagatattaatagtattgagaaatacaacccatttcatagcacagaaatacaaagaattttttaaatacatagttaaattagggagaaagaatgagaattgccatatagctaactcataggagcagaaaaatattaggttggtgcaaaagtaattgcgatttttgccattagttttaatgcaattacttttgcaccaaccatacaatggaggaaataacagaaaagcaatatttgaaacaataaaggctgagaattttctagaattgaagagagacataaatccttacatcaacgtatatttgagtaataacaataatggtaaacacttatttagcccttatgttccagaccctcttctatatgctttctatgtattaactcattaatcctctaatatcccttggataagagtaatttacatgtgagtaaactggaaaagagagaatgtgtgtagtttgcccaaggtcacacaactgggtggtgggatttcaccccaagcagcctggataccctctaatacttctctaaatcctaaagggattaaaaataaatctatacctggacacattgtcatgaaactgcagattatcaaagatttttttttaagagctcctctagaggaaagacagatcacgtacaaagggacaatcctcatcctaatagtggacttctcattagcaacagctggtcaatgaagacaatgaaaggagagattctaaaacccagggcaaggcatagaacacaagaaacaaatgtgggcctatcaaatgatacaatgttatacattaacttaactgtgaaatactgaggaaggagctggtaggccagtgagtttggagttacaagaggaagagcagctgggcaccccgtggctcatccctgtaatctcagcactgtgggaggctggagaaggaggatcactttatcccaggaactcaagaccagcctggacaacatagtgagaccccatctctacaaaaaaaaaattaaaaaatttggcaagcatggtggtgcgtgcctatagtcccagctacttgggaggctgaggtgggaggatcacttgagcccaagaggttgaggctgcagtgagccatgattgcgccactgcactctagtctgggtgacagagcaagaccctgtctcaaaaagaaaaaggagggaaagaaaataagaggaagagcctgcccccgggaagccagaaagtgaatggtcttcgtgaacctctgaaatagaaggaaaagcagggcaggcaaggagggggagaaggggcagagagtgacgagcacacgcagaaggtctctagtttccagtaatatgggaagaaaggtcatctcctgtaaaggaaggggtcaggaaagagggggctgaaggagggtaataaaggtcaaagataacctttatgggaaatggatgagaagcgtcaaaggattgcttgaaagtcttggcagtgtggtgatttgggaaatgttgaatgagtggtaccatcagcctacataattgtggcgttttcccagctgtgctttgcagcctgcgtgtaggagcacaggaaatggttgaattgattcaggatttgtcttcagggtaggttcagcaaagtatggaaaaattgagcaagtgaaggtcaaaatgagctttggagtccagtgaagactcttgggaattggagagcttggtgaggtcaaggagaaagtgtcctgggagtgagagtaagagaatacaggttggggttggagcaaaagtaactagagctttcagatttcagaagtggaataattccaggagattcaagaccccagtggagcttgaagggaagtggttagaggtggaatggaggtgaaggtcgttggaggagaaggaaaggaaaaggaatgaggaggctgggcctatagtgttgatgggctgcccatgtggacactgaaatcataaagatgtggatataaagtagggtaaagtggaatcctgggcatggtccagagagttcatgaagccaggggtcaggtggtctgtaaataacagcagtcatcatcaatcaccaatgaggcgtgtggctagaaagcaggggcctggaggaggagggccctggaaaagtgccactcattctacaagtgaccactaaccttgggaatttttttttggtggttggggggatggatcttgctctgtcgcccaggttagagtgcagtggtacaaccttggttcactgcaacctcgacctcctggactcaggtgatcctcctacctcagtctcccaagtagctggaactacaggtgcataccaccatgcccagctaattttgatattttttttttgtagagatggggttttgccatgtttcccaggctggtctccaactcctgggctcaagtgatcctcttgcctcaccctcccgtagtgctgggattacaagcatgagctaccacaccaggcccctgggtcacctcttacaccagagccagtgggttcatttgatcaatctgagcagtactcacaggattcaattgtcttctcacaccttttccccaggtttcaaagtcagagccacttgctgacttgagtgattatggcagggccccatctaatggcctttttgcaaagtacagctggagcaagcaggctcgcctgtgccccttttctcatcaaaagcaaggcaaagagggtatagattagactagcaggccccggctaggaagtaacatcttcaagagtaagaagtaatcatgatggcagccatgtggatattgactcataataatggtgatggtcagacggatattggcaggaatatttacatgagcccagcatcttgccaacctgtctttagatagccacagtctcatgaaatcttcacagatattaatatccccattttacaactgacactgaggcttagtgagagccagcggtctgcacagcctcacagctagcaagtgtcagatctaggactcaattctaggttagtttagccttggagcacgtgctctcatgtaactaatctgctgtctttggctctaaaaatgaaataagactgtaggtagagccaggcgcggtggctcacacctgtaatcccaacactttgggaggctgaggcggacgaatcatttgaggtcaggagtttgagaccagcctggccaacaaggtgaaaccctgtctctactaaaaatacaaaaattagctgggcttggtggtgcatgcttgtaatcccagctgcttgggaggctgaggcaggagaatcacttgaaccagggaggcagaggctgcagtaagccaagatccaagatggtgccactgctccaacctgggcaacagaacgagactctgtctcatagatttaaaaaaaaaaaaaaaactgtacatggagtcagctgctctaaagtctggttgaaagtttaaattttcacagtgaggaaagggaaataagtcactcccatcttaaagaagcattgtcaaaggaatatttttctccttccaagttttacagggaggcaaatattctgaaaggaattatcgtggtaataacatcccttacctgatttttttcaaaaacttttattactaggaattttctcagatgtaatgccatataatgggtgtttatcaactggaatagtgagggaaaatggctttccagccatgtgtctagtttttacacatcttcagacatggatggaaggcagagctgggttgcctcaattctgggtcaagtcagcttcccctggattagaaggggaggctggtaggctaatagcaggatgctggtgacatatgaaggaggggttgtttcttatgaaagcagattctcagagaaagaggatctgcgtaggaacaccagagagattggcctcaaagacccaaaagcaaaagaaataagttaaaaataaaacagtcctaggccaggcacggtcactcacgcctgtaatcccaacactttgggaggcccaggcgggtggatagcttgaggtcaggagttcgagaccagccttgccaacatggtgaaaccccatttttactgaaaatacaaaaattagccaggcgtgaaagcatgtacctgtagtcccagctacttgggaagctgaggcacaagaatcacttgaacccaggaggcggaggttgcagtgtgctgagaacttgccactgcactccagcctggacaacagagtgagactccctctccaaaaaaaattaaaatatgactgggcatggctcacatctgtaatcccagcactttgggaggctgaggcggacggatcacctgaggccaggagtttgagaccagcctggccaacatcatgaagccccatctctactaaaaataaaaaattagctgggtgcgttgggatgcgcctgtagtcccagttactcaggaggctgaggcaggagaatcgtttgaaaccgggaagcagaggttgcagtgagccgaaatcgcgccattgcactccagccagggcaacagggtgagattctgtctcaaaataaaataaaataaaacaaaacaataaaataaaataaaacaaggctaatgataaacccaggggctccttggcaggagcaaagctgaaccgagagctctattcctagagccctatgtctgaataatttatttttcctatctcatagtccctatgtgccttcctcagctgagatcaagtgccaaaggacatctcaaaatacccacagccaaaacttctcagcatagctccctgcatggagaaggagacagctctgcaagtctttgtcctgaaccgtttacggattttccatggtctgcaagaccttggactcacgccgcctgccagctggcagccgctgtccagcctgggaacagagcttgctccggcctgtggcgagtcctcccggggcttatcgtgaatttccccggttttgcatcttcatcctgaaaacctcccgacctttccttaatgaagattttagctgggggaaattgcattagtggctcgtgtttttctgtcaaccttctaaattatgttagttgtaagtaaaaagagtacagtaagtccttttatccgttgtgggctgttcctgggaatcataatggacaataaaataataagtaatggacaggaagatgctcttagaaccagttcggaaaactcttccagtgccagacagaaaccagccacctgcgccgttatcaggacatcaagtgaagccagtaaacacttgtggagctccttttaagtcccagcaccaaagaataatacctaacacttctagttaagagagcatcgtactgagtattatctcagttaatattcataacagcacataagttcaatgctcagtttgcagatgagggaactgtggttgagagatgtttttaatacactgcccaaggccacacaatgaatagctgacaaaactgagatctggggtcttttgattgtgtgtctttctctctccacactccacctcagctgctcagaagcagatcctggggccagaatggacctctgtaggaagcctcagagatggaagctttctgccctcaactggctgactgaattgatggaacagtgggtgataagcgagggaattatttcgtagtttggttgaaaaaaagtcttcagcatgtaaatatgtcttacataagtcatgaaaaatgggactgaaagaaatgagagacaagagggaaaagacagaagtattttctttatcaaaccttggggaaaagcatcttttcctcaaatacccaatgcagtatgtatggtttttgttgttattattaagacaagggaccctttttttacccagacccaaattcaactgccttcaaagagatgggacaatgttcttagagagtgaagtttcgcactgaaaaccagcttttccaaagagctccaaagagcacgtttaaattcggctaagtcggagacgtttgcagatgcaggcctgagacccctggcccacacttggatgacgaggcgtaaagtgaggaccctttgcctgtaaggctgtgtctccatctcagaaacctatttaaagccgaactttataatggaaacacagccacaacctgctatcagcaaccacgatattaaacaggcatagagccaatagcagtggcgtgaagccagcgaggaaagattagcatcacaagtaagagattttaggctcagggccagaagagggtttttttttttcttcttccctttttattaaaaaataataataaaaagggagagagaaagaaataaaaagaggtggaaaggtgcaaaagaattcctgtttagccaccctccctgagattgttctccttggttatccagataagtacagaaacaaaccactgcctgtctgaaaacctggcagtcgcttgaccttaaaatggtctctgcaataacccttccaacctgctccgctctcctgtccttggctggcccatgtgcagaatggagcgtgtgacctccagcacggggaaagtaataatcagtaaggttcatattttccacttggagttagaggaaagaccatgtgagcacaactttgggttgctatctttttgccctgcgctgctgtaggaagagacatgcagtggttggaagtctccctactggcagagcgtcgttccagcacccagtttgactttgtgcaagatggtgcttttctgactacctcctccctttaagctgcagccttctgaaatctcagctttcaggaaaggatgccagccccaggagttataggatgcagcagagcaaaggtggcattttccaggtgagcttcgggactgccccccttgggctctcccatccaggccatgcagtgctgactgcccatagcttgaccgctgcagatggacagggggtgctctgttgtaagcaactctcagaggctaagtgacgtgctcaatcttgctgcttgctccaaaccagcacaagattttttgtagccttcttttacacttcttatttggaaaatttcaaacctacagagaagtttgtaagaagagtgcagtgattctggattcaccaattgttaacatttttctccatttgctttgtctcttcctctccatacatatttacatcatttcccccaaccccccagaaccctttgagagtcatatacagacatcatgactccttaacttttttttctttcttttttttttttttgagatggagtttcactcttgttgctcaggctggagtgcaatgctgtgacctcggctcactgcaacctctgcctcccgggttcaagcgattctcctgcctcagcttcccgagtacctgggattataggcgcccgccaccatgcccagctaaatttttgtatttttagtagagatggggtttcaccctgttggccaggctagtctcaaactcttgacctcaggcgattcacccacctcggcctcccaaattgctgggattacaggcatgagccaccggccccggcctgaccctttacccttgaatacttcattgcgccctaagaacaagggctttcccttacgtaaccatcgtgcagtgcttaggttctggaagcttaacattgatacaatactattatctgatagagaggcatatttacatcttgccgattatcgcaaaatgttttttcaatagcaaataaaaactttaagaaattactaaatgtcaattaaaaaaaaaaaacaaaaaaaaacaaaaaaaaaaaaccacttcctaacttgcctagctactcaggaggctgaggcaggagaatggcctgagcccatgtgttcaagtccaacctgagcaacatagtgagattctatctcttaaaagttaaatcagtaaataaataaacattcatgattcatgttccagtagaggctcacacattgcatttaattgtcactttctttagtctcctctttaatctggagctgtttctcagcttttttttttttttttgagacagagtttcactcctgttgcccagtctggagtgcaatggtgcgatctgagctcactgcaacctccacctcttgagctccagcaatcctcccacctcagcctcccgagcagctgggactacaggcatgcaccgtcacacctgtctagtttttctagttttttttttttttttttgtagaaatgaagtcttgctatgttgcccaggctggtctcaaactcctgggctcaagtgatgtgcctttctcagcctcccaaagcgttgggaggcatgaaccatcacgcccggcctgtttctcagcttttctttgtctctcgtgacactgacattttgcagaacactggctggttttgtgcatgtccttgttgctgggttttccccattgtgttctcatgattagattcagactgtgcatctttggcaggaattctgtattagcaatactgagtcattgtggactttcagaatatcctttccccaacatgcatggcttccctgtgattttatttatttatttatttatttttattttttgtagagacagggtcttcctatgttgcccaggctggtctcgaactcttgggctcaaactatcctcctgcctcagcctcccgaagtgctgggaacacaggcatgagccactgtgcacagccttccctgtattttattttctggcctttgagaagactttagcctcccctggtttcccaagctgtgttcatcacagagctggtgtcggaggcctggtgggagagttggtcatgttcttcttcttcttcctttttttttttttttttttgagacagagtctcactcttgttgcccaggccgggtgcaatggcgcaatctcggcttactgcaacctctgcctcccgggttcaagtgattctcctgcctcagcctcccaagtagctgggattacaggcatgcgccaccatgcccggctaacttttgtattcttaatagagacgggatttcaccatgttggccaggctggtctcgaactcatgacctcaggtaatccgcccacctcagactcccaaagtcctgggtttataggcgtgaaccaccgcacccagccagtcatgttcttctaagcactggagaaaaaaggacagctgcctgtgctgaaaagtcaccccaagagagagcaggaagaatcccaaagcagaggcgacagtggactctttctatcctgtgctctgagtccggcaaactgttgatgaagccctcacggggtcattcacagcagaattggatctggttagatccaattccaaaaaaaaaaaaagccacatcccttggatccaggtttgctttttgtacccaagcttgggcattccatttggatggttttacctcttaaatattacatccatcctacttctccattccggctaccatggccctagttaaggtgtttatttcttttctagagcaatctcacactaaacccatatctcccacagagctatctgcccagggaatccacgtagacttcaaatctgatcattttcacagtgactggcacccaagaccttctgtcgcccggccactactttcctctgtcgttccgctattccatgctccctgcctcaaacataatatgcccaaaatatcaggtcaggatacgagagtgttaagtgccagcattacctgggagcttgttaggatctcaggccccaccctagacccactgaatcggaacctgaatctaagcaagcaagatttcccaggtgttgtgtgcgcatgaaagcaccggaggcactatctagaacctgctggaagggcctgttctgtgcaaggaacttaagctgcccctcaggctctgtggtccttggcactgaggcaagattctcaaaataatctctgattcaagggattccgctccgaaaattacattggaaattgtttttcctaatttgcataaataaataaacttagtaaatgggcttcatctgatttttacttttttctcttacaaattcttttctaaactttgggccaggcgtggtgccggcacacatcagcattttgggaggctgaagccagcagatcaccttgaggtcaggagttaaagaccagcctggtcaacatggcaagaccctgtctctactaaaaatacaaacattagccgggcgtggtggctcacgcctgtaatcacagcactttgggaggccgaggtgggcagatcacaaggtcaagagattgagaccatcctggccaacatggtgaaaccctatctctaccaaaaatacaaaaattagctgggcactggggcatgcgcctgtagtcccagctactcgggaggctgaggcaggagaatcgtttgaacccgaggggcggaggttgcagtgagccgagattgcgccactgcactccagcctggcgacagggtgagactctgtctcaaaaaaaaaaaaaaaagaaaaagaaaagaaaaaaatattattttctaaactttgacatctgctgctacttgttggctaacaagatgtcatctgctggcaaacaaaatgagtaaactactaggaaataaatggtaatgttaaaattcaacatacctggtgttcagtctaacagttcagttcaacaacagcaaaaaataaaaattaaaactttgagtgttaagcttctattaatgtatgagatactagaagaaggtctgagggatgcatagatgaatgagatatattgtatagcttattccccatgactgtaaggccacatgtgcctgtagtactggggcactgaatggtacttcagcaatgaccatccttttattagaatccttgggatgctactagtctggatttgcagaattcaccaaaatgaatgacttttgctattacctgtcaagttgatttcatcttctgtgtccagacagctatccaaaccaatataaccaggaaatttactctggattcctcagatcaatagatgaatggttttgttgttgttttgttgttgtttgagacggagttttgttcttgttgccctggttgcccaggctggagtgcagtggcgtgacctcagctcaccgcaacctccgcctcctgggttcaagcaattctcctgcctcagcctcccgagtagctgggattacaggcatgtgccaccaccacacccagctaattttgtatttttagtagagacggggtttctccatgttgatcaggctggtcttgaacccccgacctcaggtgttccacccacctcagccttccaaagtgctgggattacaggcatgagccacccggccaatgaatggtttttaaaacaaaaatcacaatgagcctgttgccttttattggctttggttttaggaggagaaactttaaaagcttggagttgaaggataatggttcaacctttcttggcgtgtaagtgatttatgacctcctaatttaacgaaagtaacaacagcgaagacaagccacttattagcgtttcctggcaattccatcagggagataggggttggggccttgagagcccaagaattaaacaacagctgaatgttattcaaaatctaaattcattatacacattgttgctttactaaaatctttactaaaatgtgatcaagaaagccttggcagggcacggtcttgaaagatgagtaccaactcatcttgggcaggcagatatcttgccaggcagatagggtggggagagccttcagggcaagggaggagcaagggcaagagtcttgaaggctgaagagtgagcaggatgtggagaggaagtttcaggctccacagggtcatgggggcaggcccagagcaaggaagagagaaaggagggtgatccagggaggtgagttgatgagaggaggcagatgtactaagtccatacatgagtgcagtatttgacagtttgcaaagcaccttcatacccactatctcaccaggtcctgctagctcagtgatgaggtgggacacctaacgtcctcacttccaggtgatgaaatggaggcctggaggagtttctaaagtcgtacaactcctaagtggtggagccaggattagaatgagatattttgacctctggacactgctctttccaccataaactgatatgttccaggagcattgaagaaagcttcctagcatattgggaagaaaactcatggttggggtgtggctgggtggatggatgggcggatggatggatggatggatggatggatggatggatggatggatggatggatggatcaatgggtggatgtggagatcagagtctcaagagaaaaagagttaagagtccagcagttgtgcaggtgagatgggggattcaaacgtctatcaggaaggtggatttgtgagatacagaggcagtggagtgaatagaacttcatgtctgaccacatgtgagaatgagaaagaaataagagtgtaatggccggacacagtggttcaggcctataatcacagcacttcgggaggctgaggtgggcagatcacctgaggtcgggagtttgagactagcctgaccaatgtggagaaaccctgtctctactaaaaatacaaaaaattagctgggagtggtggcgcatgcctgtaatcccagctactcaggatgctgaggcaggagaatcacttgaacccaggaggcagtggttgcggtgagccgagatcacgccattgcactccagcctgggcagcaagagcgatcaaaaaaagaaataagaatgtaggataacacccaagttttgaccttggatgattaaaggaccacaaaggaaaacaaacttaaaccttacagccaaagtggtaaaggtagagatgatgaatgttaacttcgaatatgtctaatagtcagttgatatcaatggatctggaattcaggaaaagtgtctgagatatccaggagattcattaggtcatcagcgatcaaaggttagcattttattatagatgttcactgtgttattataaataacgttaaaaaagagaaaaataaaaaggaaaggtcttaaacatgtaacagttgcagattggctcatttatgttacagccatatattgaaatgcaattcagaccttaaaaatgagtgctggctttgggaggccaaagtgggcagattacttgaggtcaagagtttgaggccagcctggtcaacatggtgaaacctcatctctaccaaaatacaaaaattaaccaggtgtagtggcatgtgtctgtaatcccagctgcttaggaggctgagtgaggcaggagaattgcttgaacccaagaggcagaggttgcagtgagctgagatggtaccactgcactccagcctgggcaacagagtgagactccgtctcaaaaaaaaaaaaaaaggagtgctggtttaggaggtcaatgctggaggatcacttgagcccaggagttcgaaaccagtctgggcaacatggcaaaaccctatctctacaaaaaaaaaaaaaaaaaaaaaaaaaagtagcctatattcccagcaactcaggagaccgaggtgggaggatcacctgagcctagggaggttgaggctacagtgacccatgatcgcgccactgcactccagcctgagcaacagaacaagactctgtctcaaaaaaaaagaaaagaaaagaaaaagaaaaaagagcgctaggcttgtgggtgctttcccttccttggtgatactaacatctgtcgctggcagggtacttcccagcccagatcaaaatgaagtgggctttccctactttatgtcctcagatcttctctactacccagtgagggacgaactgacactttattacggaatcacagatgagattccagaataaagattctttattctttccaaaataaagaagtagtatgattgtgataagaaaaaaggagaaaagaaaatgttattaaaaaaattggccaggcacggtggttcacgcctataatcccagcactttgggaggccaaggtggggagttttgcttgagctcatgagctcgagatcagcctgagcaacatagtgaaaccgcatctctactaagaatacaaaaattagccaggtgtggtggcacatggctgtagtcccagctactcgggaggctgagggaggagaatcgcttgaacctgggaggcagaggctggagtgagctgagattgccccactgcactccagcctgggcaacagagtgagactccgtctcaaaaaaaaaaaaaataaatatataaaataaataaaaataaattaaaaatgacatcacagcccaggcacaatggctcatacctgtaatcccaggactttgggaggttgaggcaggaggacagcttgagccccaggagtttgagagcagcctggggaatatagtgggaccccgtctctactaaaaaaaaaaaagtttttaatgacatcacagacgccagaattgattcacgagagtatatgtgagagctggtctatgaaggcaagagtggcgggtttctccccattggggaaaaatagaaacaacaggcccacccaggggcctcatacctaattctaccacaaccctgggaagggctctggaagccaaaccctccccacatgctagccccagcctgtcttacccgtgcctggagggttccttctggagtcttctgggcagctgccctggggagcaggggcccgtggagctcagccaggaggccttgcgtagtttgccttgggaggttattacagccaatccacatagatgcgaaaaccaaaccaaacacagcctaccaggaacaagtaacgatttgttcctttcttttgctttttctgacagtagatgcaatctatcgtgattcttaagtgtttttgggctagtgcccattccattgtttttgcccagagaggctcaccaggaatgagctggaaggagacacaagcccctaagtacctcgggacgcttgcttggtgaacaagaggaggaaactcagagagcagggctgccggcctccttgtctttcgatgcctcgtgtggccaccccaccgcacgagccatagccagccatctgtctcagtatttcattctcttgaggctgagctagtgtagtggctgtgtcaggaaccctgcctgtttgtgcaaagaattcattcttccaagaaggatgaggatcaaattcacctccacatggcacacaccgaacaccgaggctgtgaaaggctggcccgtgagtgtctccaggttcaatatcgatttgtcaattgtagagaaaaccagcagttctagttcccagagaccaccctgtgaattgaaataagaaggaacggggagaaattggagctatttttaagctcagcttctgaggcttattttaggaggcattattgatcatacttcggggaaaccgttctgcgtcgctggtgccagtgtctacatgtgcacatgtgaagtgttggcctagactcctgagaccatctgtgtgcccaagggaggctgcagcccagaggagaattcggactgaggctactttgcaccaaaattaggccaaactcatgaaagggccattgttgcagctgccctgggaactgtaacttagaagtgattttgtgcccttacagcctctttagtaaatgaattgagtcatagcatttgtgatccttccgcatgtactttggtacttttctgtacttttctgtcctcttttttgtttgtttgtttgtttgttgagatggagtttcattcttgtcgcccaggctggagtgcaatggcacgatctcagctcactgcagcctcagcctcccgggttcaagcaattctcctgcctcagcctcccgggtacctgggattacaggggtgcactaccacgcccagcaaatttttgtatttttagtacaaaatgggttttaccatgttggctaggctggtctcgaactcctgacctgaggtgatccaccagccttggcctcccaaagtgctggggttacaggcatgagccaccgtgcccagcctctgtcctcttaatgagttaccatgatctagggcacctgattagaacgttgtttttccaaacagcatctttttctcatcggtcactgtatcactctgatcactgccccttgaatcttcttcctcaccctttatttcacccagatgagccagggtttaccgtatgtgggacttcaggtcatggcacaaaatggttctcaacccttttgttgagcaccggtttgctggtgctctttttagacacaaaccctggaataaacgtgccctttccctcaaagggaccccactgtggattcctatccactttgttatcctttttactcttagatctctgcctcaccactttcccaggcagcctctgctttttcatcttactgttctcattttcgcctggtgcgttcgtcagcggctttttatgttaaacttcgcagatgagccacgcctgaagttattcctgtccttctttctctccggtgtattgttgttgacaggtttttatctgttgttttgaattttctgtgacctttggggtgggcagagaaaaaaaaggacaaatgtccaccatcggccggtctgaacgccacatttaatgtgttctttttgagtgttctaacccttccttcttcctgcacacatttaataacagagaaccaaaaaaagcctagttgccttcattcatgaatatttgggacagtgaggcctcagggaaggccagcttttctggctacagggacggtcttaatctggagaatggaagaaagaggtcctttaaaaaccagagagttggctgggcacagtggctcatgcctgtaatcccagcacttcgggaggccgaggtgggtggatcacttgaggtcaggagtttgagactagcctggccaccatagtgagaacctgcctctaataaaaatataaaaattagccaggcatagtggtgcacacctgtaacccagctatttgggaggctgaggcaggagaatcacttgaacccagctgcagagtttgcagtaagctgagattgcaccactgcactccagcctgggtgacagagcaagactctgtctcaaaacaaacaaacaaaattaaacccagagagttgtaatagtttcccagggccgccaaaacaaatcatcacaaattgggtggtttgagacaacagaaattgattctcttgcagttctggaggccagaagtcccaggtcaaggtcaggctcttggggatgatccctccttgcctcttccagcctctggtggctccaggcgtttcttggctcagggctgcaacactctaatctctgcctctgtctttacatgactttcatccccctgtgtgaactgccctgtgccttaatcgtatctgtgtcctctcctcttcacataaggataccagtcgtcagatttaggagccaccctaaatccaggatgacttcatctcaagatccttaactaattacatctgcaaagaccctatttccaaacaaggtcacattctgaggttcctgggagacatgagattcggggggacactcttcaacttactataggagtattgatgcctctgcctatagaggagaatcaatatataccatacaacccagcagtcctactcctgactattgaccctatgaaaatgaaaaccaggccaggtgcagtggctcatgcttataatcccagcactttgggagaccaaggcggggggtggatcacttaaggtcaggaattcgagaccagcctggccagcatggtgaaaccctatctctacctaaaaatacaaaaattagctgggcgtgatggtgcacacctgtaatcccagctactagggaggctgaggcacgagaatcacttgagcctgggaggcagaggttgcagtgagctgacatcgcgccactgcactccagcctgggtgagagagcgagactccgtctcaaaaaaaaaaaaaaaaaaaaaagatatgtataacttttattggtggttgccagtttcttccttgtatttgactgcatttttcgaattaaaaacatcttgttcctggctgggcatagtggctcacgcctgtaatcccagtactttgggaggctgaggcaggtgaatcacctgaggtcaggagttaaagaccagcctggccaacatggtgaaaccccggctctactaaaaatacaaaacttagctgggtgtgttggccagccccccataaacccagctactcaggagactgaggcaggagaatcacttgaacccaggaggtggaggttgcagtgagccaagatcatgccactacactccagcctgggtgacagaacaaaactccgtctcagaaaaaaataaaaataaaaacactggccgggcgcggtggctcatgcctgtaatcccagcactttgggaggccgagacgggcaggatcacgaggttaggagatcgagaccatcctggctaacatagtaaaaccccatctctactaaaaatacaaaaaagtagccgggcatggtggcaggtgcttgtagtcccagctactcgggaggctgaggccgaagaatggcgtgaacccgggaggtggatcttgcagtgagccgagattgcgccactgcactccagcctgggcgacagagtgagactctgtctcaaaaaaataaaaaataaaaataaaaaataaaaacatctagttcctgagaaactttttaaaaaagaaagaaaagcaaccaaccctagaggatatgctttatgccttctaacaggcatgtccatgaaggggccagattgaacagtttaggagtccaccacttatttctgtgtgctcaaactgggaatgaccatgatgctgaatttccctaaactcctatcttgccagccttcttggcaaagagttctatctggaagtttaagtagtttaatttaatagagagaaatattattcagtgactcggaaaagaatcaggcaagcctcccttcccgacaccatgaatacccacgttttttaatcggctccctcaaggtgacccaagatccaggggctcttttctacttgtgcttcttggccccccaaggacccccacaggcattctcactctactgccaatcactccaccaggggctcaacatccctctctggagccctagccaactctgtgtgtgccagcgtcctcgcttactgccggggatccaaggacaacatgcacagtgcccgcagatgatgctgagggcagccgccttactccaccccaccttcatctctgatcaaagcttttccaccatcaggtgctcctctgagagctttctcctcccctccccgctcccagctcaccccccacccccacccagtgccatctgcagtgccatctgcccccagtgccatctgcaggcttgtgggtgtgtgtcaatatttcacccagcttgtctgcagcggtgtgccactcttagcctcagaggagtcctcacatcgccagctcacacccctgagagcttgaccatgtcctcatgaactcaccgtccttcccaaaatcccataactaaaacagcctggaagtgtcaccaaggcccaaagacagccttctgaagattacttctcagtctcttagcctcccttttcctctcctctgcttcaagccctttatttatttgtttttgttgttgttttttgagacagggtctcactccgtcttccagactggagtgcagtggctctgtcacagctcactgcaatcttaacctcccagactcaaaaggtcctcctgcctcagcctcccaagtagctgggatcatagatgcttgccaccacacctgacgaatttttaaaatttttgtagagacagggtctcactatgttgccccggctggtctcgaactgctgcacgtaagcaatcctcctgcctctgcctcccaaagtcctgggattacaggcgtgagccactgcacctggccttagaaccctttaaaactcacacccagtacactggagggtaactgagctgtcactgaaaggacacaggacagtgtgaggaaaacagaagggcacagcaagccagtctcgcggagatctgcagaggtgttctctggagctccccttccaacccctcacccttctctatccctgctgcataggcttgtcgccacctcactggggacagaattttctcagacactctcaggcctgaaacctttgccttcagtttgctttacaactccctgctggctctggaaaaacaattttcccctctgcgccaaaggcctaatgatattgtccaccagaaagggttctccagagaagcactgaagtttacccagcagctaagacgatccggcctaaccctgatggatgagtttcctttactcagccttaatacccctgaaatcctgtggcaagtggagcgtttgatggggattaaataaaagcagtttacctcccactgtattaccaaatggggtttcaattccattctaagaccaaggtcagtacgggagtggatctggggtcatcactgccctagagccccggcaccagtaggcagttctctggggcccccacatggaaacctcagcagccctgagctatattcctggcctggcgtctctggaccacactgcaggcacgatgtggggttggattctttcttcacgacaccaattggccagtctcttgtatcacccctgctggccaaataatcatcttggaccccgaccattatggacctatattgagttccctccttgctgaatttggactactagagtactcttgtctgaagcacattttattttattttattttattttattttattttattttattttaagacaaagtttcactctgtcacccaggctggagtgcaatggcgcgatctcaggtcactgtaacctctgcctcccaggttcaagcgattctcctgcctcaacctccctagtagctggtactataggtgtgtgctgccacacctggctaatttttgtattttttgtagagacggggtttcgccatgttggccaggctggtctcaaactcctgacctcaagtgatccacgtgccttggcctcccaaagtgtttggattacaggtgtgagccactgcagctggcctgaaacatatcttttagtactttagtaatatatggattatatgtcatataatatcgattaaattgtgtattaaatctagtctccacaaaatcatagcccctttgagagtggaccttctcttacacatttttccaaggcacagtgttgaacacacagtaggtgcttaaccaatatttgccaattcattgaatggtgggcattcggcctcttcatctctagagtgctgtccttaagtacagtaattctatcttaagaacaaataacagttacccaactctgtcttctgcaaaacagaaaaaagaatagagaccaaaaatggttctgaggccaggtgcagtggctcacacccgtaatcctaacaacactttgggaggccatgacaggaggatcactttagccaggagtttgagacgcacctgggcaatgtagcaagaccctgtatctatttgcaaaaactatgattacttttgcaccaacctaatatttaaaaaaagactcactcctgtaatcccagcactttgggaggccaaggcaggcggatcacgaggtcaggagatcgagaccacggtgaaaccccgtctctactaaaaatacaaaaaattagctgggcgcggtggtgggcgcctgtagtcccagctactcgggaagctgaggcaggagaatggcaggaacccgggaggcggagcttgcagtgagccgagattgcgccactgcactccagcctgggtgacagagcgagactgcatctcaaaaaaaaaaaaaaaaagaaaagatagtggttttgaagagacccataaagagtatcttttttattcctatcttaatgaccatgtagaagacaagttgaaatactcttgggttggattgtatattcatatatatatatatattcataaatagtcatgtatatatttatgaaacagtcaccactgaattgtgtagctgggataatgttctcagtgagatgacccatagagatggttttcatcattggtggtagcctggacttttttttttttttttttttacagccattagtgcttttcaggctctctccaactgaatatgctgctattagataataatcaataaaccatgaactggccaggtgtggttaattccagccctttgagaggctgaggcagttggatcacttgaggtcagaagttcgagaccaggccaacatggtgaaaccccatctctactaaaaatacaaaaattagccaggtgtggtggcgcatgcctgtagtcccagctacttgggaggctcaggcaggagaatcacttgaacccaggaggcagaggttgcagtcacgccaatgcattccagcctgggtgacagagcaagactctgtctttaaaaaaaaaatagcgataataataataaaccatgaaccaacactagacccatatgcttaaagtattaactagcagccagtataccctccctccaccaaaccagtagccactttgccggtgcagagcatgagcgggacaacattgttaaaacatgaattctgcttccagtgttcctgctggctgaacctgtactttgttggcgtgtcttcctcaattgcttcctccagcgagctcccaaaagccaaaaaaaaaaaaaaaaaaaaaaagttatagtagagaggatcagtggtttggctaggcttctctgtctctttaatcgtatctgaagcataaaacaagatgactggtagacttttctcaaaatccctcctaatcagccacctctaccttgtatcctcagtagcttgtacagatggcaggaagataaaaatctacacagctactaggcttgcaccttccccaccacctgcccagcccttcaatttttagaggataatagattttcttttcttttcttttcttttttcttctgagatggagtcttgctgtgttgccctggctgtagtacaatggcgtgatcttggctcactgcaatctccacctcccgggttcaaacgattctcctgcctcactgagccttcccgagcagctgggactacaggcatacgccaccatgcccagctaatttctgtatttttgtagagacggggtttcatcatgttgaccaggctggtctggaactcctgacctcaggtgatccacctgccttggcctcccaaagtgctgggattacaggcatgagccaccttgcccaccttagattttattttctagagcagtttaggtttacagaaaaattgtgcagaaagtacagacatttttcatctaagcctggatcttaaaccatcaaagtttctgttgtagagaaaagagctgcagaattcatgattcccaaaattgtggatttatgaagagccaccctacatcgtgatcttggtggattttatctagagaaatcaccaaatctagaaacaaatctagaaatgaagcaagagcaattgcaaaatttagaaaaacacttctgttcaaagagaaatctaggctgataagacacattccatgcttatcagtgtacctgtccctactcaattatcaccacacagcacgtaatagttcatgaaatggatttaccttaatttatttggcaattctcccatagtaggatatttaaactgttttcttcctttttcaatcttatttttcttgacattataataatgttgcaataaaaatatttgtgcgtaagtcttttcctttaagattattttctttttctttctttcttttcttttttttttttttttcctcagggtttcactctgtcacccaggctggaatgcagtggcacactcacggctcattgcagcctccactgcctaggctcaagcagtcctcccacctcagcctcctgagtagctgagaccacagatccatgccaccacacccagctcatttttaaattatttgtggagacaaggtatcactatgttgtccaggctagtctcaaactcctgggcttaagccatcctcacaaagtgctgggattacgggtgtgagccactgtgccttgccaagattcttttctttctttctgttttgtttttttgtttgttttgttttgttttgttttttatttataccgagtcttgctctgtcatgcaatcttggctcagtgcaacctctgccttctggatttaagtgattctcctgcctcagctcttgagtagctggactacaggcacccgccaatatgcccagctgatttttgtattttttaatagagactgggttttgccatgttgcctaggctggtctcaaactcctgacctcaactgatccacctgtcttggccttccaaaagtgctgggattacaggtgtgagccaccatgcctggccaccaagattcttttcttaagataaattctcaaaatgtaagcttactaggtcaaagtatatcaagatttgtaagacacttgatacttattattcttaatactttacaaaaaagagaaaattactcccttttaattttggaatctataacatggtaattattcagatttgccttccccatgtagcatttctaggttcatatttaaaggaatttttcctactgagcagttattcactctctagtgtgtgtatggcgggggtggccacgggagtcaaccagattgacaccaaaatccactgcagatgatttgtgggtagaaagtagaagggaaagaggataaacacttttccttctccctgtctctgataaatagccaaagacaggaacattattacaggtgatataggaaaagtgcctccgtgacctcccacacccaggtcccatctcaggagacaaattcagcccaaggagcaaacgagaccatgaagttcacagcactccagtgtcaggtgcccccctgtaaagctttggcttgatgcaacaacaaaaggcattcgcatcctaacgtgacctcagcagatctcttcctccacctccaagagccgggagttgtaccagagctctggcagctgcacctgccaccaccggggagcccaaatgaatcattgctgtggctgagtgttttcctttggggcccggtgaagccactgcttgtttttaatggtgttggcttaattctggctcctgccctgaactgagtgtgacgataagaacatttcaccttgtccctgctctccaattacaccacatcaggaccgctgccacttcccactgctccgtggcagcccctctatgtaccacccaagttggctgactgtgggatgataggacagagaaggaacaagccaaggagcaagacagaggagactaacaggacgcagaggccactcttaacaccacaggctttttaactgaaaggaatgttaatggtcacctgggtcacttgatctcagtctccttagggccacagatctctgatgatcagatgaaagtggtcgaactctctttccagaaaaatacgccttctcaaatttcaggatgtctcccagaatccctgaaacccattcatctagactaagttgtggtttgtttgttgtttttttttttggttttggttttttttgagacaggatctcactctgttgcccaggatgaagtgtagtggcgtgatcttggctcactgcaacctctgcctctcggctcaagagattctcatgcctcagcctcctgagtagctgggacaacaggtgcacatcaccacgcccaactaatttttgtaatttttatagagacagggtcttgctatgttgcccaggctggtctcaaactcctgggcttaagccatccttgcactttgacctcccaaagtgctgggattacagggatgagccgctgttcccagttagactaagattttaatttacaaacaaggacatggaggcccaaagaacatgcaggaattagcccaaggttacacagaaaatttactgaatttacttatttatttgagacaaagtcttgccctgtcgcacaggctggagtgcagtggtgtatctcagctcactgcagcctccacctcctgggttcaagcaattctcctgcctcagcctccctagtagctgggattacaggcacatgccaccacacccagctaatttttgtatttttagtagagatggggtttcaccatgttggccaggctggtcttaaacttctgacctcaggtgatctgcccacctggcctctcaaagtactgggattacaggtgtgagccaccatgcccggccagataactgaatttaaactcagctctcctgattgccaatgtaggacccatcagcccatagtaggaggctgtcaccctgcactgagccctgtggcagcaattgtgggaaattagggtgcttacaaccaaggaaacaggatctcagactcatgaaaaaaaaaaaaaaaacctaagatcaatgagtaagcaatattcctgccatagagtcctctttggaaagtagatgctaatgccttctgttagttctccaggcacttattgagcacctatgaacatctcttaagctctaatcactgggagattcattatttattagaaattaaaactcgcctgtaatcccagcactttgggaggccaagatgggtggaccatctgagttctagaccaccctggccaatatggtggtaaaaccccatctctactaaaaatacaaaaattagccgggcgtggtgacaggcgcctgtaatcccagctactcagggggctgaggcaggagaatcgcttgaacccaggtggcagaggttgcagtgagccgagatcgtgccatcgcactccagcccgggggacaagagtgagacttcatctcaaaaagaaaagaaattaaaactcatcatctcaagcctgaagaggatgttgggttcctcaatgtgattttttgtgatttgttcagatggtgggtaccccaccctgaaatatttactacaaagttcaagtaaaggagcttcctcgtgcttgctattccatggactttggcatgagaattaggcacgctgttaatgaaggagaccagtggttggactaaaggatgccttggtggcttctactgcagccttagctattcaacagaggaacagaagactcccatgttgctgggaggttctcagtgacagtttctcaggacacacactttttaagtagcaggagactcagattctgaatttttctttctagaaagatgcaggtagcagttttgattgatgtttatcttagcggttggatgctaagaggcggttttgtttttgtttgtttgttttaatcatggaaggacctggtgaagcctacagacttgccctccagtctgagcttctctgctgactggccatgtgactttgagcaagcctctttacttctttcagccttggttttctcatctgaaaagcaggaataatattaatatgggcataatgttcttaaagcaacattaatagttcccttccctagttttacagcctattcttttctttttcttcttcttcttttttgttttttttttttttgagatggcgtctcactgtgtcgcccaggctggagtgcagtggcacaatctcggctcactgcaatctctgcctcccgagttcaagcgattctcatgcctcagtctcctgagtaccagggttcacaggcatgtgccaccacacccggctggggtttcaccatgtggaccaagctggtctcgaactcctgacctcaagccatccacccgccttggcctccctaagtgctgggattacaggtgtaagccactgcggccagctgacagcctattcttttctttcttttgcagcacatactccattctgccttgtatttttggtgatagctccccagtctgtctctcctactagatggtaacctctcaagggctatctttgtagtccctcaagcccagggcagcactttgtatgcaatgggtgtatcagtcagggcccaatcaggagatagaaaccatgcagtaatttgaataggagaaatgtaatagaaggaattattgatctctgatgggagcaactataaggatgtaaagggaactccaaaggataccctaaggctgagagagaatacccaggaaggacaaacttggcaggggcctctctgcatggctggggttcagacttcattggagaagcaggatggtggggaagttcacgaggttgacctgagccagggctggttcacagtggttgagcagcagagcgccctctggggtgcaggccagaggaggttggtggacaggggtgtgtgtggagagagagtcggggcacgctgccagtgcaaggcctgcagcacgcagtgcctgcagcaggagggccaccgtgaagtggttactgggcccaggctagggctgcaaggtcactgagcaactatgcactccaggcttgcagctggggcagagcatgaccgaaagtccccacaggcacactctgcagcccaacaacatccaaatctgaagaaatccccttcctcttgcagtggccctttagggccccctactgatgaggctcactgtaaaggagaaatgcttacagggtccagtccatgatctcagagcagaggcataagggcgactttggagctaaggcaatactatgaaaactgcaatgggtgcaatgagggatcaataaaatgtttgaattaaatcggagaaagctacataacctgtcatgcccccccttcatccgtgcttagttccctttctttgagtcctgtagattttgccaccaataaatgtcaaacctttttaactacttttgtaatttactctctggaagctcatttccctctggggtattctgtgtgtgtgtgtgtgtgtgtgtgtgtggtttttgttgttgttgttgtttttgagacagagtctcactctgtcgaccaggctggagtgcagtggcacgatctcggctcactgcaatgtccacctcccaggttcaagtgattctcctgcctcaggctcccaagtagctgggattacaggcacatgccaacatgcccagtagggacggggtttctccatctcatcatgttggccaggctggtcttgaactcccagcctcaagtaatccacctcccccaacccgcccgacatcagcctcccgaagtgctgggcttacaggtgtgagccactgtgcctggcctctgtgtgtcttcttaatgaggcatgtgtctctcttctcttagctcatacttaaaagagatttgcagaaagaaagaaggagcgggggggactggctctcgcaaacagtgtgagacccagtattttatttcacaacttatttctccacttgaacttgaacttgtttctccactgtctgtttcatttcgaggcagttcacttgtccctcccaaatgctttaggagtgtcctgaagcacttgacttcaagtagcagtggaaagaatcagagccaatccaagaaccaatctttctctgacttggagaagtcagtggccacctcgggtcagactagggagttaatctccttggacaaatctgaagagtccagtctccaaatatttagaaaagaataggcaagaagagaagaaccaccagccgacttggaggataattacaacacaaatattattcagaaagcatttagaaaggactaatcgtttcaagtaacttgagaatccaaccgagatgagttgagcctataaagagcccttcagatgccctcttgtgggagactgtgttaataggcaccaagtttgggttaggacagtgttcttgggtatcaaccaccctgttcttccaaaatattgcattctctcccgaagagtcagatgtaattagtgttaactgttgattccctccaggaatgagctaaacagtgggatgtggctacagttaagacttcctctaagaatgaagtggttgtccaaacttaaatctgttggccgggcatggtggctcacgcctgtaatcccagcactttgggaggccaaggcggatggatcacttgaggtcaggagttcaagaccagcctggccaccatggtgaaacccccatctctactaaaaatacaaaaattggccgggcttggtggtgggcacctgtagtcccagctactcaggaggctggggcagaagaatggcttgaacccaggaggcggagattgcagtgagctcagatcccaccacttcattccagccttgagactccgtctcaaaaaaagaaagctgtttatcatcctgcagaaggatgattatccctttagaccagaaaaatgacagtgagaagaactagaagaacttaatttttccactgaaatttagacttttttttttttttgagacagtctcactctgtcactcaggctggagtgcagtggcgcaatctcggctcactgcaacctctgcctcctgggttcaagtgattcttctgcctcagcctcccaagtagctgggattacaggtgtgcagcatcacgcccggctaatttttgtatttttggtagagacagggtttcaccatattggccaagctggtctcaaactcctgacctcaagtgatctgcccacctcggcctcccaaagcgctgcgattacaggcatgaaccactgagcccaggccgacatttatatctatatattgcggctgtgttgttgttgttgttattattattattattattattattattattattattattattttgcaagtgatgtgcattctgggccagtgaaacctagagcagattggcaggaaaccatctcagtgtcttaccaagctttaccttgttacctttatgtgtacaaaggaaattgtgcccttaaatgatcaagaaaaacaggtgtgtttcccctggataatgagattgtggtttattttcttatttttgcttatctatattttctgcaatgagcatgttttatttgtgaaactaaatatatataaaaatatatggccgggcgcggtggctcacgcctgtaatcccagcactttgggaggctgaggcgggcggatcacgaggtcaggagatcgagaccatcctggctaacacggtgaaaccccgtctctactaaaaatacaaaaaattagccgggcgtggtggtgggcgcctgtaatcccagctactcgggaggctgaggcaggagaatggcatgaacccaagaggcggagcttgcagtgagccgggatagcgccactgcagtccagcttgggcgaaagagtgagactccgtctcaaaaaccaaaaaaaaaaaaaaaaaaaaaaatatatatatatataaaatatatatttttaacatatatataattttaattttaaaaaacacacacttttctaactcttggcctatatccctgctttttgactcaaatttagccagaccctttccaacctctttactcctcctgttcaggtgaactgccaaaaatcagcagacttcagtttgggaagagattttttttttttggaagagattaatttcctcactcttgaactcctaaaaacagcccagtttttcttctacctctcaccaagcagtgattgatgctacacctgcctctgatgtgacaaaaccaaagccatgaatcaaagccttctatgattcttgcgcattctgaggctggtgaaagcactagccgggggccctgagacgtgtgaagatgctctgtgtgggggttattctgcctcgggcactttggagggtaacacctgctatcactaacctttgatatgttgctctgctttttcagattttcgacaatgaagccaaagacgtggagagagaagtttgctttattgatattgcctgcgatgaaattccagagcgctactacaaagaatctgaggtaagcaacagttgggatgagatgtggaagattcattcattcattcattccacaactatttcttaagtgcctcctaacttgggaggatgccatctctcgtcgtgtggattcaatttgctttcgtatcttgctggttctttttgcaagtctcaaaattaagtctctaactcttcagggaccatcattggccctggctgttactcaatctccacttagttttcctgtctcccaactctgccatcatttttggcaacgtcagtatccatagggctggaccatccaacacactggccttgctgaaaaacaacagtctccccaattacatgcgctcttttttttttttttttcttttttttttttgagatggagtctcgcccaggctggagtgtggtggtgtgatctcactgtggcatctgcctcccaggttcaagccattctcctgcctcagcctcctgagtatgtgggattacaggcgcccaccaccatacctggctaatttttgtatttttagtagagatggggtttcaccctgttggccaggctggtctccaacttctgatctcaaatgatcagcccaccttggcctcccaaagcactgggattacaggcatgagccacctgtgttttatttgtatctgaatcaatccttgaaaactttgatagctcattccagcacagctcctttctctcaaaacagcaagcaccttaatgaggacatctcctttgttcttggctgagaataaatttcagagaacttctttctgtctggttttcaacctaccaggatccatcctttgccttagttctaccttcttgttatacggtttgtgcaagtcaccatttatatcccattagtattttattaatggctgctgacggaacttgggtgacccacttgtaaataacatcccagccctgcaatgacagcagatgcagggctatttttgttggttagcgacatgccaccaatcccaatatgtttggaatcagggccccagactcgtccttgagccgtaacacgtggaccttgaaactcttctcccagagtcatcaaggctgatgggagacacaataaataaacttattcaaaatgaattctgtcgttacgcaaataaaccaggctcccgacgtggttcagatttcttttgcctccacattttggggttcatttcggtataaaagtcttacctgatcttagcaaatgctcggctgcttaattgcaggcgcttatgttcagctgctgtccctgaaagggctggggagaggctgatgtggatcactctgtgttgctcatctccacccaaagggtgagcgttttaacatcatcagctttcattatgctctgtggccaaccacacctatgcattttaagataaagaaagttaaacgctccctacgtaactgtggacccgccgaagagggaaataaacagggccactgaccttccccttgtctcactccacagaaatcctatagtttcatgtcaagtccgccagtgcttaatggggctctgatgatgcgcagagcattgtgcaaagcactcctgtgacgcctcgggcccccccgggctgctgtcctacctggacctcccggcctctttgggagctctgggccttccaggaaagcagggttgccagaaaactctgaactaatttcagcttttcctcccagtgtgctttggcgtggctctgcctggacttcagggagttccctcctgattcagtaggaagtcttgatacaaatatagaatattaatgaagaaatcaagtctcatttctagtcaacgtgcctgactcatttccctgtgctctgtgcccccaaagaacctccactagaaagcttcctttcattcacacagacattcgaggagcttttccttcatgcttcacagggtcactcatgggcacgtccgtacctccttccctgggtcctagagtattcttccctggatgcagcttggccaaggagatgagtggtaaagagtccagtaattattcatccaataaatatttatggagtcctcactgagtgtcacatacaatgttaagatggggatgtctgggcatggtgcctcacgcctgtaatcccagcactttgggaggccaaggcaggcggctcacttgagttcaggagttcgagaccagcctgatcaacatggcaaaaactctactaaaaatacaaaaattagccggcagggtggtcagctactcgggaggctgacgcatgagaatcgcttgaacctgggaagtggaggctgcaatgagctgagatcacaacagagtgagaaactgtctcaaaaaaaaacagcaatgagccaaagagatgcttagggtccctcccttcaggacacttccaatctaacaaataccacgcagagagtatttggcgaacagtagagaaatagtcacacagatacatatggagttcagagtcacacgtgcaggaaggcaggtacggggagagactgtgataaggaaactgaatttaagaggataggatcaggagacatgctatggaaaaaatgacatttcaggccgggcgcagtgcctcacgcctgtaatcccagcattttgggaggccgaggcaggcagatcacctgaggtcaggagtttgagaccagcctggccaacagaatgaaaccccaactctactaaaaatataaaaattgcccgggcatggtggcatgcgcctttagtcccggctactcagaagactgaggcaggagaatcacttgaagtcccagcgactcaggaggctgaggttgaacccaggaggcggtggttacagtgagccgagatggcaccactgcaatccagcctgggcaacagagactcggtctcaaaaaaaataataataaataataaatgaagctgaggtgtcataggatctaaattatgcttttaaaatattgttctggatggagaatggactggagaagaacagagtcaggagaccaccaaggtcactattgtgatttatattgtcggttacttaggttctgtcgtggcttgcgctagagggctggtggcagagatggacaggagcagatggtttggaggtatattttgaagatgagttgacagggattgctcatggattggatgtggggatgaggttgaaggaggaattgggatggccttaaggattctggcttgggcaactgatagatgggggtgctgcttactgaaatgggaaggtgagaagagaggtatacgttggagaaagatgagtggattttgtgatgtcagtgaggcatctaacacagacagaaatgagtctggagcttaggtgagagatctgggagaccaatttgagagtatttggcgaataggagatttaaaaatcctggggatggatgagaggaagaaagcatgaaatataaatgggaaaggggttcaagtctgagccttcaaggatggcagcatatggagatcaggttgaatctaaaagaatcaggagtctaaaagaattggccagaaagttaggaggaaaacacagaaatgcaccaaggaatgcaagtttcaagaggaggagagtgaccagaggtgctgaatgctgccaagagatcgagtaggaagagaatggaaaactgtccgctggagcagttctcaactgggggtgattattgcctcacgaggatgcttggcaatgcctatagacattcttggttgtcaaaacataggaggtgctactggtatctagagtgtagaggccagggatactgctaaaatcctctacagcacagaaagcccctcacaacaaagaattatctggctccagctgggcgcggtggctcacgcctataatcccagcactttgggaggccgaggcaggtgaatcacaaggtcaggagttcaagaccagcctggccaacatggtgaaacctcgtttcttctaaaaattcaaaaaattagccggccatggtggtaggtgcctgtaattccatctactcgtgaggctgaggcaggagaatcacttgaacccaggaggccgagattgcgctactgcactccagcccaggcgacagtgcgagactccgtttcaaaaaaaaaaaaaaaaaaaaaagcattatctggctccaaatgtccatagtgccaaggctgggaagccttgttctacaggaagaggtgattgaagatggatggaactctggattcagctttgacgctcagggccacccctggcccgccctggagtcttacggttactaaatggatgcgggagaaggggccccatagggctgagccctgcacattcatcatccattgtgtgacctcccaggggatctgctggcatctggaacaggtggaattcctcctccgtggacctggcagccggaccacaaagggctataggtaccactgggagcctgcaataaaatcttagaaaaagcattcccccaggggcgactccctcgtaaccccagccccatcaccttcaacaggccagaatacagactgcagtctgaacccacccaaaggaagaggggtgagtttcctgggctgttttggtggttgtgtctactgtaaacacaccagggactgggaataagaggaacaaccgattcagaaggcaaaccatttccaaacaaatgtctaactggcacactgtagataattaacaccctccaccccaccacaggagtttccttctaaaatgaaatctgaccttgttctttgcttgaaacccctcactggccctcctttagagttcagctcacacaggactccccctttctgagttttcctgggcatgcccccaccactgctggtctggaggcagcaaagttctggtccgtggcttctagatcatgctaggttatgctagctcatcactatggcatgagctctgcgaagacaagagctggctctttcccagccgctgccacagcaccagtgcttagcaggcgctcactcaatggttgctgaatgaatgagtgaaggcaagggactttgctttttttcttccagcagtgacaatttcagagcaaccgctatcaaagaaaatgaattcgttgccattaagcaagcagttgtgaatcagagttcctttttttttttaatcggaggcatccagctccatgggccttttcttcccatccatctttgtaagttgacgatgtcagcgtcctaaatagaaacgctctttatgtgaggaagccggatgctgatgggccgaatctgttcctggatttttttgatgctgatgaacccagaccagggttatctgggttgctcctctccactcagctactgttgcacacacacacggccatccaggccaaaggaggggatgaaagcactttcctttctttttccatttctccctggaaacctttgagccacacaatcaagactgcctctctcatgaaggtgaccagagcttggagttttccactgggtgccctctgcccgatggccctcgtgccatcgccactaaccggggactcagaagcatgctttggggattcaggaccagctgatagcccagctctgtgctttccttattctcatttttgctgtgttgctgtttcctgttagggcctgaacttcagctctcaaaaacctcttagcttcaagtttgttctcatagtcattaatggactctgcagggcagtgccgtattgtggggtgggggtgggggaggaattagtgtgatttttttcaggcagagagagcccctccattagtcacacagaccactgagaccctgcccgcccataagagtcataaagctgtttgcaccatgtcacatgtaaaatgaccatcatcaacaccaaagcaggaaaaggggtgaagccaaaagctgagcaggttggactggttatgtggctgatacatagtgtcttgccgctgccaagattttcatcccagctccttgatgctctgccaagatttcaaggtgaagatcccagcggaggaatgaggaactctgcacgataagttggagcatgcctgcagaggccacaggcagtgcggccatacccgcaaggctgagttggcagttttggggtgcaagaacaaacctcaacttctagcctgcaggactagcccaggctggagaatctgaaagccatgctgggagagatctaacccagaggcctttgatattggcttctagtcaagttcaagtccagtactttctcctccattcactgcagtagttcctgaggtctggcttccatcatgagatggggagtgaccaaagaaaatggcatctatactggcctcctgggggctgccacctgcagcaatctcccctagacacaaatgtgtagggcgcgtgcagcttctcaatcttcagacatacctccagggcaaaggaagggaaagaaaaaggaatgtctttcctagtcaaggaagtagaagtagagggttttgtgtgtgtgtgcttccttttttaaatcttcattgattcatgtaatgaaaagcaaaggagtctctagcccagaggttctcaactacaggcaaatttgtccctcagggccatctggcaatatctggagacatttttgattgatgaaagtggatacggcatgttatgaatccagtcggtagaggtcagggaggctactgaacatccaaaatgggccaggtgcagtggctcacacctgtaatcccagcactttgggggaggctgaggcgggaggatcacttgaggccaggatttcaagaacagccggagccacacagcaagaccctatttctacaaaaaaaaaataaaaataaaaataaattctctgggcatagtagcatgtgcctatagtcctagctactcaggaagctgagatgagaggatcacttgagcccagacgtttgaggctgcagtgagccatgatcatgccactgcactccagcctgggaaacagagcgagaccctgtctctaaaaaagaaaagaaaagaatccaaactgcaccacaacagagaattatccagctccaaaatgtcaagtatgccaagatcaataaaccctgacatggaccaatccaaggaaagaaaacttagtaaaacctactggtatcaagactcattaatgaattcctttagttagcatttactaagcacctactgagtgccagctccacactaagcattgagggtacaaaaacaagattatgtcagccctcaaaggtcctgtcttctactgccttttgaattgatcatcttgttacagatgaagcaatttctcatcccctttattttggaggatataaaggccatcttactagtgataaatacagcatagtaagttgaataggggaaatttgcaattgtttgtactcagatagcaacaaaggagaaagaataacatgaggctgtcctagaagcatgggcccctgacgtggcataattaaatgtttttcagacagaatttgattttgaactttccccttaagttgggtgactaagtctccaggtccctgggtcatagccttcctggaccaagaactccttggcagccagttcattggtccccacagatctaaatatctgttgaattctctgttaagggagagagaacagaacaaaaggagatacatctagcttttccaataactgtcaagggtgagagattaaatgttgtttgctaaggaccggccctcagaaagggaacagagagatcaactaagtaaatattgtcatatttagctgtacccttcggtacaaagagcttcatccaaatcactcggctccctcaaatgaaaaatattttcattctggtctacatcttggcctttgagggtggtaaagattttccgttacctctaatggccagatttaacacagctgcctcatgccggggtacatcgttaagttcacttggttgtgctgttattatctttttttttttcccgtttccctcaagtccatctgtttctttctgagagtaacgcagctgttttgcagtgggttccaacttactggggcctgcatgcttcttggaaaataagaggacttgatgacatcactgggatggggagaagtccctgctgccaaaggggtccctggtgggagcctctaaaactggagggagagggaggaagcctgcaaaggagacacaagagaagggtcctcagcagctgccgcatcgcgggccctgagccctctccccttccagggtctggatgatgccagtgctgttagaaattgagagagaaggccaggcacagtggtccacacctgtaatcccagcactttgggaggccgaggcaggcggatcacttgaggtcaggagttcgagaccagcctggccaacatggtgaaactccatctctactaaaaatacaaaaattagccacgtatggtggcgggcacctgtaatcccagctactcaggaggctgaggcaggagaatcacttgaacccaggaggcgaagcttgcagtgagccaaagatggtgccactgtactccagcctgggtgacagagcgagactctgttgaaaaagaaaaaaaaaaaaaaaaaaaagaggccgggcacagtggctcacacctgtaatcctagcactttgggaggccgaggcaggcagattgcctgagctcaggagttcgagaccagccaggacaacatggtgaaaacccatctctactaaaatacaaaaaattagccgggtgtggtggcacatgcctgtaaccccagctactccggaggctgaggcaggagaatcgtttgaacccggaaggcaaaggttgcagtgagctgagatcacaccattgcagtccaggctgggtgacagggccagaccctgtctcaaaaaaaaaagaaacccatgatctggttgggaggatatggtataatgacacaaatgctaagtgacagtacggagcaaggcagcaagagaaatacattcacacagtcatgtgtgatctactttcctcaaacttgtacacatagtcatcctcagaggattcccaggactagtcagggaagactttacagcagagatggaatctgagctgggccttaaaaacataataggtttatgtttattttttgctcataaattaatacatgatccttgtaaaaaaaattccgacatgatacaaacacaaaacagagcaaatctcctatgatccctcatcacagacatcgctgttaaagttggtgtttatacttaaacataatgcataaatagtattattttataaaactaaactcacactatgcacaccatctcgcaacatgcattatttcactaaccacataagcttgccatttttctgtgcagcacacgcctgtctagtgagttttaggtggccggataatatgccagtgaaggccaggttcagtggctcacgcctgtaatcccagcactttgggaggccaaggcaggcagatcgcttaaggtcagaagttccagacccacctaggcaacatggcaaaaccccatctctataaaaaatacaaaaattagccgggtgtgatggcacatgcctggagtaccagctactctggagactgagggaagaggatcacttgagcccaggagtcggaggctgctgcagtgagctgagatcccgggcagcagagcaagaccctacctcaaaataataataataataataataataataataataataataagcgagtgtacggtggtgccatgtgtacatcattctccatttgatggacatttagggtgtttccattcttattatggtactgcaagaaacagccatagatatattttgagagttgttctaacgtctctgtagaataaatctaaaagtgaaagtgttgagtcaatggacatatgggttgagattttcctagatataacaaaattgcccacaccctgcggctacattaaattgcccctgactcacacttggatgggagcaaactcaggtctgaagatgtgtgagatggaatggacagtgtagtgaatggctgaaaatgaggagtctcagtgcatggtcaagggtcagtgaggcacaagggaaaaacattgagtaccaagtcaatgaatttggactttattctgcaggtcgcagagagtcttcaaagcaggggtcaccaaaaataaaaaattccgttggccaagaaaaaagaaaaagcaggggttatcagcaaccgtgcaaggggactctacctgtgacctcaccagaggggctgactgtcttgtggggatggtgagggcaagctcctgggtgcccagaggtttaggacccttcaaatccatcaacctacatccttccctcttctgctaccccctttcatgaacaaattgccctcagccatcttgacaacaataagattttattaatgaataggaacatttggaaataaaaaggtgttaaacagtagtccagttctcaacaaccctggctgcaccattttcagaccaataattggcatggcaactcacttcccaaggaacaatgaggtgttctttttcagacctcattccttccaaacccgggaaagataagacgccaagtctcgctgaagcaccgtgcctagtgctgattttaaaagccactgctgttctcttggcctaataatgcgaagctacctcagcatttggatcaaaccccatttttactgggattactacaaaaaatgatagtgcccaacttcatcctagagaaagagttttcatttttttttttaatttttcaaggggaaaaaaaccatttaaactgctgcagtaattggcatgaatgatgttccccagaactcagtgttcagagcagcagttgcaaatcctaccaattgaatttggtagtgaaatgccagaccaagtaggtcaaacaaaatcaaggcatatgaattcctaaatgccagatcaaaagcagagaatctaagtctctgccaggagtgcagttgctgattgtggcattgtgggtcattgaatcaatagaaagagcccttgggggccaggtgcagtggctcacgcctgtaatcccagcactttgggacgccaaggcaggcagatcacttgaggtcaggagttcgagaccatggcaaaaccctgtctactaaaaatacgaaaattagctgggcatggcggcacgcacctgtagtcctaggtactagggaggctgaggcacgagaattgcttgaatccgggaggcggaggtggcagtgagctgagatcgcgccactgcactccagcctggacaacagagtgagactttgtctcaaaaaagaaagaaagaaagaacccttggggaaatcaccctatcaccctatatcccaaaaggaacagaccagggagggaagaattcatccaagcaaaacattcatggaagggagaaacagttgggcttttcatagagggatctgtgcaaaagataacccctagaacctatgaattgggattcccaacttgtgtgctctgtgtctagatgattcagccctaatgtggtgagggccctggctctgggagcctcccaggcggtcacagccactgcatttgatcatcatcaattctgtgtctgagtccctccctcccttccaaagaatggacagatggacagatgggatggagaagtgagatgacgtcaaaggcaaggcatggaaagtgaccagcacagtccctggcacacagtaagcatttcataagtgttcccttctctctgctttgaccctggcttcgagctctgcagatgggttgcaggaatggtggctccgtggaaaccatgtgtctttggaaagtggccaccgtgagtggcgtcacaggagtttgtttgcgtgtcgcttttcccttgtcggtgtgagtggagaacaggagcagaggtgtgataccaatagctccagctctcaggatcatgggatcctccgccggctcagcaagatcctgcagaagttacagccatttgtgctgctgagacttttcaaaaaaaatgtgttattgcctctgttatggtttaacctgaattccggatggcacgtgtctctgctacttcacctcgaagaaaccttagaagttacatttgctgtttgttttgtgccaagtctgggccatctgtggcactgcagtgccgggatggtacccaaggcagtattgccatgctatctctgtctgccacgagccttcttacagctgtactatagaaaactaacatttaagactttcaaagaaggaagcaagagctgaagggcccaaggctctcagccaggagtgaacagatacaacaagctcttcttcagttccatctcatggagaacttccctctgtaatttttttttttttttttttttttttttgagacagagtctcactctgtcacccaggctggagggcagtgtcacaatttcagctcactgcaacctctgcctcctgggttcaagcgattctcctgcctcagcctcctgagtagctgggactacaggtgcacgccaccacgcccagctaatttttgtatttttagtagagacagggtttcaccacgttggtcaggctgctctcgaactcctgacttcaggtgatccactcgccaaagtgctgggattacaggcgtgagccaatgcacctggccctgctctgttctttcaagaaaacaggcaatgagtccacacaagttgctcataactggggccagccacatcagcccctgctgtttttagtcttattaaagtaaaacaccagaacttcttggcccttagaacagagttcccaaatcaggtcagcatcacccagggaggttttgaaaactggagatatccgggtcccaccttagaccaacccaaccagactcaactggtctgggacccaagaatcagtgtgtaaatgcaccaggtttgggaaaatggcctcagagcagagcttcccatcttttttcatgccttgacaggtaggaagtgtttcgttttggccaggcgcggtggctcatgcctgtaatcccagcactttgggaggccgaggcaggcggatcacctgaggtcgggagtttgagaccagcctgaccaacacggagaaaccgcatctctactaaaaatacaaaaatcagccaggcatggtggcgggcacctataatcccagctactcgggagcctgaggcaggagaatcacttgaaccctgaaggcggaggttgcggtgagccaagatcgcgccattgcattccagcctgggcaacaagagcgaaactccatctcagaaaaaaaaaaaaaaaaaaagagaaagtgatttgttttgattgacacattgaggaggagctcctggttaagatgaccaacccctgagctcagaaggcccagtctgttactcaagggctgcgggagcaatatgccttatcacatctactatccattcaccatagggaagctttgcctaagagagctcaacttactgaggtcaaggttttaaaccactttattgttacttaatttgggggaggagggatgcaggggggttagcaatgtaagcctgtaagcctgcccattccccgattgtgagagaggtcagtgcctttgaattttgttctgtctgttgggaatctgacgccatctgtagaatcagatccaaagtcttccttgacagctactagcgttaattataacataagtttgtgcagtttttttcctaagttgcttctgatttgggggtggcttcagattgacattattgaagtttatttcctccacccaaagactctaggccggctgtgattgttcacgcctgtaatcccagcactttgggaggccaaggcgggtggatcacttgaggccaagagttcgagaccagcctggccaacctggcaaaagcctgtctctactaaaaatacaaaaattagacaggcgtggtggcgggtgcctgtagtcccagctactctggaagctgaggcaggagaatcacttgaacctgggaggtggatgttgcagtgagccgagatcgtaccatttgtactccagcctgggcaacaagtgagactctgtctgaaaacaaagacaaaacaaaaaaaagactctggtagctgtccaccaggtcctctggctaaatcttctccaagccctttctttgtttagcactctaagaatctgcaacaatgactatgatgtttgaggtggcatttttctccttgagaaataagacctgacagagcgattgtctgctccacatctagttattcagactccaaatacaactgttcagcttctgttccaaaaatacccaagaaagaataagtgttattaaggtgcttgtcttcatcttttattattaagaggcccagagaaagacttataattactagctcattagcttgggccttagaattttcaacgaaaatttctcacaaaattgctaaacctggttttagaaggtatggaactaacttttgagaaaaataaattccaccatttagagtctcactgtcgcccaagctggagtgcagtgatgcaaccacggctcaccgcaacctccacccctccaggctcaagcgatcctcctaccacagcctcctgactaccagcacatgccaccacaccagctatttgtgtgtgtgggtgtgtgtgtgtgggtgtgtcgtgatggggatcttgcagtgttgcctaggctggtctcaaactcatgggctcaagtggtccacctgcctcagcctcccaaagtgctgggattacaagtacgagccaccactgcacccagccaacattgtctccattttatagataaggaaactgaggcttagagagtctaagtaactggctggaagtttcaggaagcctggattcaaaccccaaagtgtcctaccccaaagattatgcttcccctacaccaagtaagattccttcaggtaaagctagacgtacaaacaactgttgtctttggaaatcactctaagaaatagttcccttcttaaatatatcttcccaaccccgagtctcagtgactaaatgatcttagggaaagactggtatgtagaaaaagaagggcctttgagacggttggttacctgatgtgatagaattccactcctcatctttggggagaagtttcctctttacaaacattccagaacatagtggattggccaaaagcagcttgggtctgtaaaaaaaaccaaaaactaaaaactagccatcctccattagagaatagaaaccttttattattttttttcttttacacaaggtctcactttgttgcccaggctggagtgcagtggcaccatcacgacccactgctgtcttgacctcctgggtttaagccattctcctgccttggccccctaagtagctgggactacaggtgcacaccatcacacccagctaattttgggtttttttttttttttttttttttttttttgtagagacggggtttcaccatgttaggtttcccaggctggtctcgagctcctcagctctaaccatctgcccgcctcagcctcccaaagatgacaggtgtgagccaccacacccagcccaggaagctatttttaaaaagaaaaaaaaaagccattagtcaccaaagaacccatctacagaccctaattcagaaatattccttttctcactttagcatccacacgatagtcttagagttaaataacttgcccaggttcacacagtagttactggagctgaaattcaaacctgggggcagggcatgtgttctctcacttcaaagcctcctcagttcatctctcagttctgctccacagatctgaggaccccacaaggtgctcccgggcatggtaaacagtgaaatacattgtatcaaacagtgaagggagaaacagcctgaagaatccactcatcacttttacctgctttatatactgggattccaaaagtgcatttggagaaacaaaatgagttctgaagctcaaataagtttgaaatctaaaagtggaaatattttattgtcttcaaattacagactgattggcttattgaacatctctaccctggtttctgttcgacaagttggaggcctaaatttcccaaaataatacagtacacaaggagcaagctagacttagggacagttaatctggtgctgatcactgttggcatgctgcaactcatcgagatatttgtcagcctattatcagcttttgatttaataaacttaagctatctctaggccaaattgtagatcctcggtaggaatgcaggctgttaatgcctccccatagccttcgtctaaagagcactgctaaaatcagagtggagaacagcctcaagttcaaaggctgcaaaccgagccaggttctaataagctccctttatgggaggagctgggttcttggcctctcactgtctcatgtattaaggtggggtcctctccagtgtgcccttgaatgaccttattgcttttgattagaggttaccttgaactatactcatattgccaaacggaacaggttagtgttctgcaacaggatgttagggagacagctcttgttgctctggaactgggaaccaggcccaaagctggggacaaagaggaattgggactccacattcaccaggcagctgctaatcaccagtggcccagatgaccctcttcccacagctctggttgcccctatcttccccttccctaggccctatgtggagatgaaggaggggagtttgtagtcattgggagtatacttcttgcctcaccccaatcccatgtgacaggagtagtattctgagagaatcaactacagtagctggggcatctgcaaaaaaaagctggctataggcccagtgcagtggctctaatcccagcactttgggaggccaaggcgggaggatcacttgaggccaggagtttgagaccagcccagacaatatagcaacagcccatctacaaaatatttttaaaaattagctgggcccagtggcacatgcctgtggtcttagctactcaggaagctgaggtgggaggattgcttgagcctaagagttcaaggctgcagtgagccatgattgcaccactgcactccagcctgggtgacagagtgagaccctgacacacacacaaaaaatagttgactgtttgctgagccgggaacttgcaggcccaccctcaatgctgccatcctgcaagacttgggtgatactaataagtgtccccaaaagcttgcagaggaacgtagagattgcacctgctgcccatctggaaatttctaaaggagtttttgaaggagcccatggctagggctgagatggaaccatgggagtgtgagcttgggaatagcacgggggcatccccttgggcattattgaaaatgcaggtaatagtgggctacttttagtagcttgcttatgagaattctggggtgttttctgtgtctccaaccagttcaattctccagcaccagctatgtgtccaacaattcaattcaattagacactgtctatctggagttagcatcagatcccagtcccacaaagctgccccacttctcactgacaggctataggccgggcacagtggctcattcctacaatcccagcactttgggaggccaaggcaggtggatcacttgaggccaggagttcgagactagcctggccaacagagtgagactccatctctattttttttactaaaaaaaattttttttttaatctggggtctccacgactccttcctcaggctcaataatttgctagaaaggctcacagaactcaggaaaacatttacttagatttaccagtttattatcaaggatatgactcagcagcaggtaaatgggagagaggcatcaggtgaggtattggggggtggggacttggggcttccgtgccccctctgggtgtgccatcctcccagcaggtcagtgtgtttaagcgtttatggagctcaatcccagcaccccctccctccctagaggtcagtggatggggctgaaagttctaaccccctaatcacctggtgtttctggtgaccagagccatcttgaggccatctagggcccctcacctgtgtatgtgatctgaaggagcttgttatgcatcccaaaagtcacccccatcactcaggaaattccaggagtttttggagcattgtcttaggaagcagtgacaaaaaccaaatctattttgtattacatcacaaggatgaaatgagaaagcgaatctgaagtgcctgacacagactctggtacggagcaagcacttgaaaacgttagctcctagggtgatttttcccagcttccttccttgactttcctctggccacctctcttgcaagttctcatttgctttcatcttctccccagttcctaaaaggcatcctgggggctagaaaccataggctttttttttttttttttttttttttgagatggaaccttgctctgtctcccaggctggagtgcagtggtgcgatctcagctcactgcaacctctgcctctcgggtttaagcgattctcctgcctcagcctcctgagtagctgggactacaggcatgcgccaccatgcctggctaaattttttggatttttagtagagacggggtttcaccatgttggtcaggctgatctccaactcctgacctcaaaagatccgccctccttggcctcccaaagtgttgggattacaggtgtgagccacggcgcctggccaaaaccatggactattacattgttttgtgtgatgtgctcaaatttctcatttgcctcgtccctcttcttaaagcaatgagtttcaagtgtttgtggcactgaactataactgagaagggtacaaaacagaaacattccccttgccacagctgcctttcagtgcctttctacacatcagatgcaccttatgagtcaaactcctttaagagagtcattttgcagagaaaaaacacaaaccgctcagggtttgcggtgcattctagtgccaagagcaaatgctttaaaaatagcactttaggtattaactgctaacaaagcaagaattgactgcttctggcatgatttgcatttagggttttggtttgtttttttttaagttgatgcatagcagttgaccttttaagtcaagttttaggtcagttctccagcacattctgaaagctccttagttttgtctcttttttaaaaaacagctttattggctgggcacaatagctcaccactgtaatcccagcacttttggaggccaaggcgggtggatcacctgaggtcaggagcttgagaccagcctggccaacatggcgaaaccccatctctactaaaaatacaaaaatcagccgggtgtgctggcacgtgcttgtaatcccagctacttgggaggctgagacaggagaattgctggaacttgggacgtggtggttgcagtgagccgagattgcaccattgctctctagcccaggtgacagaatgagactccgtctaaaaaaaaaacccaaaaaaacagctttattgagatatagatcacataccatacaattcagccattttgaatgtatagttcagtggattttactataatcacatgtttacctcaccacaatcaaatgtaaaacattttcatcaccccacaaagaaacctcatatgttttagctatcatctccctaccctctcccctcacccatctcccaagcctcagcaaccacactgatctactttctgtctccatagatttcccttttctgggcatttcatatgaatagggtcacttaataagtggtctttggggactagctgctttgaaagctccttggttttatgtgtatccctcttaagattcaagttcaaggaatcctacattaattcagggctaaactttactttcattggaggggaatgagaatgagatctgcaacaccttggagtcttcaggagaagttccaggatggagagaaaaaaatctgacatgtgatatgtgttgttcatccatccctattttagggctgagggttatagttacataatgtagcaattcctggctggagttcctgcttagccttttttcatttagcatttatcaaaaacttctcatttcaattaacagggcaagcccctgttggctattgccctttgtggttcaaattgagagtgtaattaatcatggagacttcatatctcagtgaacgtcagctaataagattgcctccaagatgcaagctcagccccagctggaccaagctctcctgtgggcttctccttgcaccttccaggtgggagactgattctatccaaaacgaggacgcagttttacacgggctgctcaaacaagccctttgctctgccttgtcccagtgcgagatggatgaggcctgcaggtgtggctgatcctatagagtggacgccttctaaagatgtgccgaagtccatctggccccagggaaacagccctggcaccagctcaaccccctcgatacagatgggctttaactacaagggtccaatttgccatctgccaagcctggagagaatcggtagcatccggagccagagatctcattgtggatgaatttataaaaccctggctagaagaacttgcagccccacgcgttccccaccagccagctgccgggccgagaggagctgggcagggcccttgaggcaagagcatcgcttgcagagaagttccacatcccccagcggagccagatgccactactggggttcggtgctccgtgaccacatgagtgagctggaagagtgaccgcggaacctagaagacttgccttgtaaaaacctctctgactcatgttatgggtttgtgtccccccagaaagctaggttgacgtcctaacccccagaatgtgaacttacttgggatagggtctttacaaaggtaatcaagttgaagtgagatcattagggggaccctaatccagtatgatgggtgtccttataaaaaggagaaatttggagctgagtgcagtggctcacgcctatggtcccagcactttgggaggtcaacgcaggcggatctcttgaggtcaggagttcaagaccagccaggccaacatggtgaaaccccatctctactaaaaatacaaaaattagccaggagtggtggtgggcgcctgtagtcccagctactcgggaggctgaggcaggagcattgcttgaacccaggaggtggaggttggatggcaccactgcactccagcctgggtgacacagcaagactctgtctaaaagaaaaaaaaggttggggggaatttggacacacagacagacaagcacagagggaagacgatatgaagatgcagtgagaatgtgatgacttcactccagtgatgcttctacatgccaaggaacgcccaggggaaaggcatgaaacagattcctcctcacagcccttggaaggaccagtcctgatgacacctcgatttggggcttctagcctccagtactgtgaaacaataaatttctgatgtttaagccaccagtgtgtgattatctttttgttgttgttgttgttgtctgtgatacttgatacagcaggaaacgaatagactagtggaaccaaccctccaccctaaataggtacgaatgaaaaacacatatcacatgttagatttctttctctgcattacggaacttttcctgaagcctccaaggtgttgcagatctcattttcattcctctcccaatgaatgaccatttcaaccaggtaaaatttagccctgagttaatgtaggatttcttgaacttgaaccagggaggaagagagccctgccctggcttggaagattactggaaggaaaggacagcgtatgcctctgtatgcctttcagcccttcacaaggagagcttgtaagtcacctttaagatgcgtgaaggctgccggactttgaggctcacccatcctgccattgggaggtggctgcccagtacatgcaccgttcaaggagggccccctgcttggctgggaccacgaggttccagaggcccccaggtgaaatcgcctaagggagcggcccatgacagggacaatctgctctgctctctgctttcgtccacttggaacagagtgttcctgcctctgaaacataagagaaagggggaaagacattggtactgagcactgaagactgtcggttcacctggacccagaacccagtcataacatcccacagaacaagaacccttctctcgcaattcctccaaccaccatacttacggacactggcatgtgacagcttccagaaaatggaaatgcccacccaggctttcactcacacaaggaaacctgcatgctgttgggcagtcatattttttatttgagatgatcagcatttttctgtacatttgactacaggataacaataaactcatagtaatcctacagcccctgggacattcccactgcctttctttggaggagcttaataagatttgaacaaagtgcactacagcatctctcagggcatccttgtatcatgtgcttatcactttgggatgtctcctgtgcatcacgcaccttctatgtgccaggctgggctggggactttgcctaccttatccaatttaagtcttgcaacaacccgcaaggaagttttttgattttttttgagatggaatctccctctattgcccaggctggagtgcagtggtgcaatcttggctcactgcaacctccacctcctgggttcaagtgattctcctgcctcggtctcccgagtagctgggacaacaggagcgcgccaccacgcccaactagtttttttgtatttttagtagagacggggtttcaccatattggccaggctggtctcaaactcctgacctcgtgatctgcccgcctcatcctcccaaagtgctgggattacaggcatgagccaccacgcctggccaggagttcttaacaccattctacagatggggagatggaagctctcctctgatcaattgtgccagaatttcagacagaatgtcctgtccacatggtgtaggggtgacgtgttaaaccatttgggctgcaataacagaataccatagactgggtagcttataaacaataaacattgattttttacaattccagaggctggcaaatccaagatcaaagcattgacagattcagtgcctggagatggctcgtttcttggttcatagatggcgcccctctcactgtgtcctcacatggcagaaagggtgaaggagctatccagagtttcttttataagagcactaattgggccgggctcgctggctcatgcctgtaatcccagcactttgggaggccaagatgagcggatcacgaggtcaggagatcaagaccatcctggctaacacggtgaaaccccatctctactaaaaacacaaaaaaaattagccaggcgtggtggcaggcgcctgtggtcccagctactcgggaggctgaggcagaagaatggcatgaacctgggaggcgaggcttgtagtgagctgaggtcgcaccactgcactccagcctggacaacagagagagactcatctcaaaaaaaaaaaaaaaaaaaaaaaagcactaattgcctcccaaaggtccccaccccctaataccatcacactggtgattaagtttcaacatatgggttgggttcggtggttcacacctataatcccagccctttgagaggccaaggcaggaagtgtgcttgaggccagaaatttgtgaccaacatgggcaacataatgagacctcatttccacaaaacattaaaagaattttttaattagctgggcatggtggtgcatgcctgtaatcccagctaggtgagaggatcacttgagcccaggagctcaaggctgcagtgagctgtgatggcaccactgcactccagcctgggagataagagcaagaccctgttgcaaaaaaacccaaaaagtttcaacatgtgaattgggggaggggcaacaaacgttcagaccaaacgttcatgggagcccgggtcggggtggactgtggctgagttgctgattacttctcagcttcaggttcctcatcaagagcatggagataatatgtgtacttcatagcagtgactggatcttgactgtacattcaggtcaccacctgttcagaccccacccaggaccagttaggtcagagcatgggggtctaaccttgctcttctgtctggacctcatcccgaggtttcagtcacagttctggaggccggaagtctgaaatccaagtgagagatttcgaggctctaggggaccatccttcctttcatcttccagcggctccaaaatttccttggtttgtgactccttaactcccatctctgcctctgtcctcgcacaaccttctcctctgtgtcttctcctcttctgtatcttataaggacacttgtcattggatttagggccctcccacttaatccagcatgatctcatctcaagacccttaacttaattacatctgcaaggacctttcccaaataagatcacgttcatagatagatactaggggttaagacctggacatatttttggggaggatttatttaacccacagcagacatcttgcactctgttttctgattgcactgagttgggacccagcaggggtttcaagacacgtaatctcggtcacactaaagtccagccttatgacgttttataattggccagaccttgaaacttgcctgtggaaaggcccaggggatttttaacatcggggatgaaggttgaggtttataaacctctttttaaaataaggaaacctggaaatggaggattaaaatgtaaaataattctgttcttttataaagaataagtgctataacaagagtttgaatcaggcccaaaacactacagacattctagaaatacaaaacagaaatatatacatatttggaaatgttgtaagagaggtcaaccgatgtgtgaagggggcaatttagatactgaatgttcgtaaacccaagtgagaaaatgagaaagaaaatgacttcataaagaatgggtcttgggaggtgttaaggaggacagtgaggaggagggggtagaatgtgaaaagagaagtttgcagcaactggactatttcagataagaccagataatttggttcccttcccctccccacccccgttttttttgttttgttttgttttgttttgttttgtttttggctcatcttcattcaaaagcatttacctggatgttcatttctaatcttgagttttgattaaaggagtcctttcccttacctccctctagctctttgaaagtgaatccttaattataggccatgtttgagattgactagatgaaatcaacagctgtagatatgacaccagactgcaaaatatcgacacaatgttgccataaaaagcccaattgttaattgcttatttggcactgggctataacaaaaacaccctttttctgtttaatattaaaagtaaatgtagtggaaagaacatcgagctagaagtagggtaggctgggattctagtcccagccctattgccgagtgcctgtgatttgggggcaaagcattttatttttctcaggccccggtgtccttatctataaaactgagggcatgaaaccaaattaccactttcagcttaaaaattatattcttaatcatgaaaatacagcatacttctcatttctatcctttttccaaaactttatttcacaatacccaaatataattctatacttttgtcacgcaatcaggaaccacacattgatttaagcatctacatcgtttttgctgtgcaagcaatacttttccagtcttattctgaactgaagtgagctgtcagtcccgacaattctcaactgctttggaaatgcaatccactggtgttccatttttaataccgtgaagtcttgttttattcttgaagaatatgaatctgaaatgtacatgaagatgctggaatagataccatctcaaactcagctgtcattgactgaagaaacaagccaagggcagtccatgaatcagggagggagggcaaggtcgggcacagccaactggtccaggttcctcttgctcagtcagacccactgtgcaggacctgaagggcaggaaggcagctcagactatggccctggtgacagtgacaggagggcagccaaatgcctaggcagataggggtgggaccccagtgaaaccccacttccaagccaaagacagtttaaagcctgaaagccaagctacaggttaaatcctcagaccagattgagaactggcctttcctctgattgatccccacccttcacctattttaaatatgcctactctttcctaattggttatctacactgtcgtgcccacttttgagtggtatcttcactttaaccttttttgcatactcacaaaccaatcagcatgcgctccctattgttagcccataaaagccccaggctcagccatattaggggactttcccactttgggataggtaaccaccccacccccagtatcctctctttgctgagagcttgcctttcgcataataaattatactccactcactctctggtgtctgcatgcctaattcttcctggttgtgagacaagaactcggacctagctgagctaaggagcagaaaaaatcctgcatcactggtttttattttatttccctgcctctggtgcctgcccaccttgctttgtttgctgggttgtctcctacatctctgggttaccaggagcttggactcctgctttcctctacttgccgtctttgtcctatcctttacttactcagttgcttacccaagcaggaagacctccacttaggttctcgagggtttgcctgtccatattctggtcaactgcaggggggaagccatgtcttctaagcctcaagatagttgtttacgtgcaactatcagaggtaaacacccatcatttacctctgttgggaggaagtcaaaagacagatggggaaagaaaccaaatttccctgtttaactccacctcctgtattttaactcatgagagcttcttgagaggtataaatttccttgttttcagctttcaggcttgtggctgattgtgtgaacttttggtgtgctctgggaaagaacaaagcagcattcattctcttcatctttggtaatccagttaatgcacctgttttataatatgcttgatggatgtgttttgttacctgttgctgagcaacagccccaaaatttagtggcttaaaacaatgagagtgcattgtttctcacaattctgcactcttgactgggtttagctggccagatctgctcttcatgatgtgagcttggattgaaatatctcagatggccctttcactcaacgtggtctcagctgagatggctggagcatctgagacctggttgagcatgttgccacatggtctcaccacatggctagcttgggcctcctcatatcatggtgctctaaggtaatcagcctagtcttcttacattgtggagggttccggtttctggcttccagcttctcttgaaaggctaaactgacacaatgtctcttctggtacattctgttggtcaaaacaaataacagaccagtctagattcaaggggtggggaaatggtgaggggaacagcatgtcagcacagtgggggaaggaattgatggtggccatctttggagatgtatggtagataatctctcaatttattggtcttctcttttctttttatttttttccaaattcaacattatttcttattttattttttaaacatacaaaaagctgtacacagctttttaattaacacatacagcttgatgattttggacataagtatacacctgtgaaaccatcaccacaatctatgccataaatctttttttgttttttgttttttttagagacagagtcttgctctgtcacccaggatgcagtgcagtggcgcaatctcaggtcactgcaacctcctccccccagggttcaagcgattcttgtgcctcagcctcccaagtagctgggactgcaggcacacaccaccacacccaactaattttttgtatttatagtagagacagggttttgccatgtggcccaggctggtcttaaactcctgagctcaggcagtccacctgcctagacctcgcaaaagtgctaggattacaggcatgaggcactggctgctatgccataaatctatccatcacctccaaaagtttcctcctgccctgttttattattttattattatctttttactctcaatggcatgatatggtataggaacacagagcaggcaggaactagtcccatggcctcaagcagcaaatttcccagcaattccggggtgctatggaaaagcatgttgtctctgccctggactataggattggatacattacttaaatgctcctttgactgccttgggaaatgcaataatggctaacatcaattgagcacttgctacgggccaggccctatattagtctttttcatgtatcatatatattttattttattttattttatttatttatttatttatttgtttatttatttatttttgagatggagtctcactcactttgtcacccaggctggagtgcagtggcatgatctcagctcacggcagcctctgcctcttggattcaagcgattctcctgcctcagcctcccaagtagctgggattacaggcacatgccaccacacctggctaatttttgtagttttagtagagatggagtttcaacatgttggccaggctggtctcgaactcctggcctcaagcaatccactcaccttggcctcccaaagtgctaggattacaggcatgagccaccatgcccagcctcatgaatcacattctcttttttttttttttgagatggagtctcgctcggtcacccaggctggagtgcagtgatgcgatcttggcttgctgcaacatccacctcccaggttcaagcaattctcttccctcagcctaccaagtagctgggactacaggcgcccgccaccacgcccagctaattttttttttttttttttgtatttttagtagagatggggttttactatgttggccaggctggtctcaaactcctggcctcccaaagtgctgggattacaggtgtgagccaccacgcccagtcgaatcacattcttaaattagcatagtctttccaggcctatgcatatgatttcggtggtggtttccgggttggtttaggcaatggaaacacaacctggcaaaattaatagagaagattcagaaatgtcacccacagtcaaggtcacgagcccctcccttcagactcacttactcccttcagatacttattattcattctcttttccttcccccttcccagaatctcttttgtcaatattgttctactccattagcaaaacagactttatatcctattaatcaaatatttgtcccacttgagtccctttctcccctcacccccaggcccactgtcttcctgcaacagagaccaagaaggaaggaccctgaaggaagctcagggaaccctgatcttcagtgtagggttgcgtctgttctgagtggagggaagtgctctgtgaccacacatgcccctcctacacccccagggcaaagaaatgtggtcaaggtggaaggcagtgcagtacctggttctcatggagcacactcaagaaacgtgctcaggatcatgactctgataatatgactttaggctgggtgcagtggctcacgcctgtaatcccagcactttgggaggccgaggcaagcggatcacgaggtcaggagttcgagaccagcctggccaacatggtgaaaccccatctctactaaaaatacaaaaattagccagtgtggtggcacgcacctgtcatccagttacttgggaggctgaggcggaagaatcgcttgaacccgggaggtggaggttgcagtgagccaagatcacgccactgcactccagcctaggcaacaaagtgcgactccatctcataataataataataatagtaatatgactttaggtaggaccatcagcaaacccagagccagtacatgccctgaaaaacccaccgacgcaacatagcatttttcagattgtattttttaaatgtttataatatgtcatttacataccataaagctcacccattgaaagcgtacaacttggccgggtgcggtagcgtatgcctgtaatcacagaactctgggaagccgaggcaggtgtatcacctgaggtcgggagttcaagaacagcctggccaacatggtgaaatctcatctctactaaaaatacaaaaattagccaggtgtggtggtgcgtgcctgtaatcccagctacttgggaggctgaggcagaagaattgcttgaacccaggaggcggaggttgcagtgagctgagattgtgccactgcactctaaacagagtgaaactccatctcaaaaaaaagaagaaagtggtgtataattcaacgtttttttcatatacttatctagttgtgagccatcattttaatctaattttagaacattttaatcaccccaaaaggaaattttgtttctgtttgccgtcattctgcataccactcccttcccccagctttaggcaaccactaatctgcttactttctccatagatttgcctcctctggacatttcatatccatggaattatacagtgtggcctttggtggttggcttcttctacttagtagcatgttttctgaagctcatctgtgttggtgcatgtatcagtacttcatttcttcttttttttaaatttcaacttttagatacagggggtacatgtgcagaatagttatatgggaatattgtgtaatgctgaggtttggagtatggatcctgtcaccctgtggtgagcatagtaccccatggacatgatttcattcttttttatggctgtgtagtattccatgggcacctagattgatttcatgtctttgcttttgtgaatagcacagtgatgaacatatgagtgcatgtctttttggtagaatgatttcttttctttgggcatatacccaataatggggttgctgggttgaatggtagctctgtttcatatgtttgttggccacctgtatgtctttgagaagacttcatttcttcttatggcacagtaatatttcattgtatggatataacacatgttgtgtatctgatacaggcaagcccctaaatgggtgcttagcccaggaggttcttggcttcacccaggaaagaattcaagggtgagccggtggtgttaaaagttgaagcagtaggccgggcgcggtggctcctgcctgtaatcccagcactttgggaggccgaggcgggtggatcacgaggtcaggagatcgagaccatcctggctaacacagtgaaacccccgtctctcctaaagatacaaaaaattagccgggcatggtggcaggtgcctgtaatcccagctactcggaaggctaaggcaggagaatggcgggaacctgggaggcggagcttacagtgagccgagatcgccactacactccagcctgggcaacacagcgagactccatctcaaaaaaaaaggacaaaaaaaaaaaagttgaagcagtagcagcagaggtgctgctccttgcagagcttgactgccccctaagcagtgtgcccagaataacagcacagaggcagtgctccactcattttatagtcacttttaattatatgcaaattaaggggtggtttatgcagaaatttctaggatgcgggtggtaacttccacgttgtcaggtcattgccatggaaaggggcagtaacttcacagtgttgccacagtgatggtaaatgacatggccgcttcttatggaaacctgcttccgccctagacctgttttagctagccctcaatttggtccagtgaccgagcgagcttctagaatcaagtcttcatttctcagtgtttgttttgttttgttttttgtttttttgttttgagatggagtcttgctctgtcgcccatgctggagtgcagtggcgtgatcttggctcactgcaacctccacctcctggattcaagcagttctcctttcccagccttcccgagtacctgggactacaggcagatgccaccacgcccagctaaatttttgcatttttagtagagacggggtttcaccatattggtcaggctggtctcgaactcctgacctcaggtgatccacccacctcggcttcccaaagtgctgggattacaggcgtgagccactgcacctggcctcatttcttcctatggcataataatatttcactgtatggatataccacctattctgtatccattcatcagtaatgcagttgctgggtagctctgttttaagttctttgagaagtctccagactgctttccacagtgtggactaatttaccctcccacctacagtgtatcagcattccgttttctccacggcctcaccagcatctattgttttttgactttttaatgatagccattctggctggtgtgagatggtatctaattgtggttttgatttgcatttctctgatgattagtaatgctaagcattttttcatgtttctcggcgacctgtatatcttcttttaagaagacttcatggtcaggcatggtggcttacgcctgtaatgccagcacttcgggaggtcgaggcgggcagatcacttgaggtcaggagttcgagaccagcctggccaacatggtgaaaccccatctctactaaaaatacaaaaaattagctgggcgtggtggcgcatgcctgtagtcccagctactcgggagtctgaggcaaaagaattgcttgaacccagaaggcggagattgcagtgagccgagatcatgccactgtactccagcctgggcgacagagcgagactccatctcaaaaaaaaaaaaaaaagaagaagaagactttgtttctttgtatgccagaataatatttcattgtgtggatataccatatattgtgtatccatcaatcagttcatggaaatgtgtattgtttcccttttttgtggctattatgaattagaacatccatgtacatgttttgttttttggggttttgtttgtttgtttgtttgtttgttgagacagggtctcactctgtcactgaggctagagtgcagtggcatgtttacagcttaatgcagcctcaatttcctgggctcgagtgatcctcccaccttagcctctcaagtagctgcgactataagcatgtgccaccacacctggctaatttttgtattttttgtagagaaggggttttgccatgttgcccaggctggtcttaaactcctggactcaagtgatccacctgcctcagcctcccaaagtgctagggttacaggcgtgagccactgcacccagcccatgtacatgtttttgtgtggatatgtgttttcaagtctctcgggcagatatctaggagtgaaattgctaggttaaatggtaaccctatgtttaatcttttgatgagctactgaaatgttttcaaagtggccacactatttatatttctgtcacaatgtatgagggttccagtttctccctatctttgccaatgcttgttattgtgaacatagaatttaactagtctttcacttaggtatttaccaaattttggctaagattctgatgtcccagccacatgtgtgtgatacgtcgaatagggttgaagcattcactcaacaagcatgtattcaacatctgtgatgtacccacctgccagacccatgacaggggaagcttcagaagcagaaaggaggagccctcattctgagccacccaggaaagggtccttggaggggatgacactgaagtactttttttttttttttttgagacagagtctctgtcacccaggctggagtgcagtggcacaatctcggctcactgcaacctccgtttcctggattcaagcgcttctcttgcctcagcctccctagtagctgggattacaggcatgcatcaccatgcccagctcatttttttatatttttagtagagacgggcttttaccatgttgcccaggctggtctcaaactcctaacctcaaatgatccacccaccttgtcctcccaaagtgctgggattacaggcctgagccaccgtgcctggccaagtgtttttttgttttgttttgttttgtttttaatacagctgggatcttgctatgttggccaggctggccttgaacttctggcctcaagcaatcctcctgccttggcctcacaaagtattgggattaaaggcgtgagccactgtgcccggcccctaagttaagtcttgaagcaaggaaaggagaatcaggcagagtgcaggacttggtgggggagaaggaacttcaggaagggggaccagtgcctacctaggaggttccagactcctggggctttggagaatgaggccagcagaagcttcttaaggctcacgagagaggtgtggctttgggaggctggtccggaaaagatgccagaaaaataagtaataacatcaaaggccttgtacctccttcctgccagggcatattacttttatgctacactcatggtgccatggacagattttgaggaggggagtttacatctgggaggccaccgtggcagcagagtggggaatggtggatggagagattgagaagaggcaggagggcaagcattcacccgctactttgatgaaggcctggcgtcagctggcatggaagttggccctgggagtgcactgtgttttttaggggagctacagttgtggaagtggtcaccatagcaaaaaggtcctaacagaggaggcagatctgtaagggaagtcaagggcagcctgaaagccctctttagaggccagtgccagatggccttggcggagccacggccagatctgagagaataaacctgtctttatttgtaagcagcctgcttttacctcccaagcccacccctgagacacagtctggtctgcattaaaagggctggggctgtcccagccaatttgattttgtgtctcatcctatctacttctcaacacaggaccccttgactgccaggtttctcctgggaggggagatgccaattttctgcttcagcctgtagactccgctgtgtgctgtgaggttctttcccttcctggggtccaacatccccgtgaacaggaccaggactagccccaaacccacagctggacagcagatcctggagcagctgcacgtcttctttatgataatgaaaactggctgggcccggtgacccacgcctttaataccagcactctgggaggccgaggtgggcagatcacttaagcctaggagcttgagactagcctgggcaacatggcaataccccatctctacaaaaaatacaaaaattagccaggcatggtagtgtgcacctgtagtcccagctacttgggaggctgaggcaggaggattacttgagcctgggaggtcaaggccgcagtgagccatgatcctttctcaaaaaaaaaaaaaaaaaagtactgaaaattagctcatacatacatatttaagcataattactgggttttatatagtttacatgttctaaggtatctctgaaaaaaataatcttctaatgaaataatcagcaaatgattggctaatggcaatcattagacaaatattggatgattaaacttaaaaaaaaaaaaaaacccttgctgggcacagtggttcatgcttgtactttgggaggcctagcactttgggaggccaaggtgggtggatcactcgcgttcaggagttcgagaccagcctggccaacatggcaaaacccggtctctattaaaaatacaaaaattagctgggcatggtggcgggtgcctgtgatcccagctacttaggaggttgaggcaggagaattgcttgaactcaggaggcagaggttggggtgagccaagatcaaaccactgcactccagcctgggtgacagagcaagactccatctcaaaaacaacaacaacaaaaaaacccttttacctgtttttttcattcttgtaattgaagtataatacaaatcttaagtgtaaaactcagtgaatgtgtacacgttacatccaggtcaacatataatcatcccagaagtttccttcatgtccctttgcaccaagcccccacccccaaagagattactgctcatctaacttttatcaccatacataaagttttgcttgttcttgaacttcaatttgaatcatacaatgtatatgctattgcatttggctacttttgcttaacatagcatcagtgagagttgtacacgtttttgcatgtatcagccatttgttctttttcattgctgtgtagtattccattgtgcacctagaccacaatttatctgtctagtttcttgcttatgaacatttggactgtttccagtttttgcctcctgtatttaaagctgtcgtgaggccaggtatggtggctcacacctgtaatcccagtactttgggaggccaagaagggaggatcacttgaggtgagaagttggagaccagcctgggcaacatagtgagacccatctctacaaaagaagaaaagaaaaaattgaggccaggcacggtggctcacacctgtaatcccagcactttgggaggccgaggcgggcagatcacgaggtcaggagatcgagaccatcctggctaacacagtgaaaccccgtctctactaaaaacaaaaaaattagccaggcgtggtggcgggcacctgtagtcccagctactcgggaggctaagacaggagaatggcgtgaacccgggaggtggagcttgcagtgagccgagatcgcaccactgcactccagcctgggcgacagagcgagactccatctcaaaaaaaagaaagaaagaaaaaaagagaaaagaaaaaattgagacacaatataattcacccttttaaataaatgtgcaattcagtggtttttcgcatatgcacaaggttgtgcaactgtcaccactgtctaataccagaatgttttcatcactccaagaggaaatgttatatccattcataatcactctacatcccttcctttcctcaatccatgtcaactactaatctactttctgtctctatgtttgtttgtttgtttttgagatggagtttcgctcttgttacctaggctagagtgcaatggcgcaatcttggctcaccacaacctctgcctctcgggttcaagcaattctcctgccttagcctcccgagtagctgggatgataggcagtaggtgggattaccaccatgcccagctaatttttgtatttttagtagagatggggtttctccatgttggtcaggctggtcttgaactcccgacctcaggtgatccgcccgcctcagcctcccaaagtgctgggattacaggcgtgagccaccacacccagccctatttctatgttatttaatacttattcctgacatttaataatgatggtcaaacttttaatatatcaatttctttgatttttttttttctaggatcctaagcacttcaagtcagagaagacaggacggggacagttgagggaaggctggagagatagtcatcagcctatcatgtgctcctacaagctggtgactgtgaagtttgaggtctgggggcttcagaccagagtggaacaatttgtacacaaggtaagtggtccaacagcagttcctgggctgtggacaaggtaactgtctatattgccaaattggagtccatgatacacaacaggtgcacaaatacatcaggtcactgcatctcaaaaacactttttgggccggttggggtggccaacacctgtaatcctagcactttgggaggccgaggcgggtagatcacttgaggccaagagttcaagaccggcctggccaacatggtgaaaccctgtctctactaaaaatacaaaaacattagctgggcatggtggtgggtgcctgtaacccagctactcaggaggctgaggcaggagaattacttgaacccgggaggcagagattgcagtgaaccaagatcgtattattgcactccagcctgggcaataagagagaaactctgtctcaaaaaataagaaataaaaataaaaaataaaaaaataaaaaatactttttggatgaaaatgcattttatgcataggttcaattttcttccactaatagatgttttatgccccatctctcattctgtgacctccatgtctattaggcaagcgtatttgggaaacacacttctcagtttggtattggactcatctactcccagacagagaaacttgggaaacagccaaagggcttatctgtgagcacagcccctaaggttaattgccacccaaaagatctacaaatgtaagcacctaagcagaagatgcccagaggtagaacaagaaatcccaatagtcccattagacagtataccccagcatttctgcttctttaataattctgttactaaagtagccaggtgtggtggctcatgcctgtaataccagccctttgggaggctgaggcaggtggatcacttgaggtcaggagttcgagaccagcctggccaacctggtgaaaccctgtctctgctaaaaatacaaaaaaattagccgggtgtggtggcacgtgcctataatcccagctactcaggaggctgaggcagggagaattgcttgaacccaggaggcagaggttgcagtgagccaagatcgtgctgctgcactccagcctgggtgacagagcaagactccatctcaaaaaaaaaaaaaaaaaaaggaaataataagaataattctgttaccaaataattgttaacagcctcgggatgcagatttcaattgtaaacctactttggctaaacatgttcattttggttttttgttgttgttgctgctgctgttgttttgagacggagtctcactctgtcgccaggctggagtacagtggcacaatctcagctcactgcaacctctgcctcccgggttcaagtgattatcctgcctcagcctcccgagtagctgggactactgggaggtgcgcacgccaccatgcccagctaatttttgtatttttagtagagatggagtttcaccatgttggcagggatggtctcgatctcttgacctcctgatctatctgcctcggcctcccaaagtgctgggattacagacatgacccaccgtgcccggccggcatgttcattttgtagcagaatcccacttggtgaagagtcatattttctcagggtttctaacatgactctgtccctcatgggagaaaaaaatgggaaatgcaatgttgagcattgccctttgtagctgctctcattttcataagaataaatactacccaaattgtctctacattccagataggctggttatctgtttatttttccacttaaaaactgataagagtagcttgccaaaattattttggagtcactggaatttaaccttaatgcactgagctttttgttacttagatggatttgtctattgagattgggggccagttaacaataaaaagtttaattctggaatttaggtccaagaactagactgccagtctcttgaaccctcataactcaggctcacggtaatggcagactctggcacaaacatgagagccctgggtgttttcttgaacagagaagcatgccactcctttcccgtgctccagaacccagccagccagccaggagccagaatgaaatgtgatacgtagaaatcaagctccaggatctcctgttttcctcctgtgtcctgattattgcacaggaaagcaattgcagctcccaaagtaaatgttttccagcctcagctttgtgtctatctaaggcagtgtcttccttggtttcccacagcatccctttttgtgtgtggctttttaaggtaaaaagacttcctcttactagggccactatcatagtattattttgttttgttttgtttttttgagatggagtctcaatctgttgcccaggctggagtgcagtgacatgatctcggctcactgcaacctccacctcccaggttcaagcaattcttgtgcctgagcctcctgagtagctgaggcacaggtgcatgccaccacaccaggctaacttttgtattattagtagagacggggtttcaccatgttagccaggccagtctcgaactcctaaccttaagtgatttgcctgcctcggcctcccaaagtactgggtttacagtcgtgagccaccatgcccggcttcatagtgtgttttccactcacaaagcatatttaataaggcagagttgtcagttaaaaagagaataatacaaaataaaaataaggctgggcgtggttcacacctgtaatcccagcactttgagaggccgaggcaggcagatcacttgaggtcaggagtagttcgagaccagcctggccaacatggtgaactctcatctctactaaaaatacaaaaattagctgggcgtggtgacaggtgactgtagtcccagctactccagaggccgaggcaggagaatcacttgaacccaggaagtagaggttgcagtgagcctaggtcgcgccactgcactacagcctgggggacagagcaagactctgtctccaaaataataataataataataataataataatttaaaaggccatatttatattgccccagggtccactgtgtttcttttctcacagatgactcaggctagttttgagaatctgtttcctgaaaatacctgtaagatttatgccttgccctttccaaatataaggaagtgttattgacactccagaaacgcacctgctctcgcacgtgagtcgctaatgagtatctgaggctagcatttgcatgggttgaaggtgccagggatgcctttctctgaacacctttgtttttttaagaatctattcacagttaaggggaaaaaaatgttcgaaagcgagccatgagcacattattgaattctggtttccagccgacagctgtgttgtgcttcgtgtaatagggtacatttactgatgcctcgatgctgttcttttgatttccatgaatttgagacactcagcactcaagtgtgtatagctgtgtgttgtttcttgtattcattatgtgtttcctactttcaagtcataaaagcctcactagatatccagaggcctggagtcataaacacttcattataaatgctttccttgtttctgcaaattcactgaattaaaatccttcatttattgaaacatgcttgaaccttccacgagaggtttttcacaatcactggatttgtttggcaggaagaaaggaatgttacagggatactgtgagtatccaagaaatgtaaaaagacatatttacccaggatggaaaagaataccatgaaataaaaacacatgaacagtatctcacacacgcagacacacacacacacacaaatggtatatactattttccttagccttctattgccattatgtgtcaccataagaaacaatttcatcctttttgtgtccagtcaagcttgtcattcccattacgttctattctagttcaggtctcttttttcatcctttcaatggtaaacggcctttttccccctcttctattacatgaaagtcaaacctaaaaggatatttacttatcttgtatctcacacattcatttatgcttgtttaaaaattgaggccaggcgtggtggctcatgcctgtaatcccagcactttgggaggccgaggcaggcagatcacaagatcaggggttcgagaccagcctgaccaacatggtgaaaccccgtctctactaaaaaaatacaaaaattagccgggcatggtgacaggcacctgtaatcccagctactcaggaggctgaggcaggagaatcacttgaaccagggaagcggaggttacagtgagccgagatcgcagtgagccgagatggcgccactgcactccagcctaggggacagagcgagactccgtctcaaaaaaaaaaaaaaaaaaaaaaagataaaaagaaaaattgaatcaatatttattttttaaataattttttgtgggtacatagtaggtgtaaacatttagggggtacatgagatgttttcataaggcctgcaatgtgaaataggcacaatgtgaggaatggggtatccatcccctccagcatttatcctttgtgttacaaagaatccaattacactcttaagttattttaaaatgtacaattaaaaaattgaatcaggctgggtgaagtggctcacacctgtaatcccagcactttgggaggccaagacaggtgaactgctcgaggccgggagtttgagaccagcctggacaacatggcgaaaccctgtctgtactaaaaatacaaaaattagccaggcatggtggtgcgcacctgtagtcccagctactgaggaggctaaggcacaagaatcgcttaaacacaagaggcagaggttatagtgagttgagattgcaccactgcacttcagcctgggggacagagcaagactgtctcaaaaaaaaaaaaaaatcagtatttaggatatgtcatcagaaaagagggaatgttaagtgctgttcactttttaggatatgtcatcagaaaagagggaatgttaagtgctgttcactttttaggatatgtcatcagaaaagagggaatgttaagtgctgttcactttttaggatatgtcatcagaaaagagggaatgttaagtgctgtttgcttagaagtgacttgctgtcggccaggtgcggtggctcacatctgtgatcccggcagtttgggaggtcgaggtgggtggatgacgaggtcaagagatcgagaccatcctggcaaacatggtgaaaccccatctctattaaaaatacaaaaattagccgggcatggtggcccacgcctgtagtcccagctacttgtgaggctgaggcaggagaattgcttgaaccctggaggcagaggttgctgtgagccaagatcgcgccactgcactccagcttggcgacagagtaagactctgtctcaaaaaaaaaaaaaaaaaagtgacttgctgcctagaaaagtgttctagatttccaaaatttatgacctcctggcaccagtgagacacaccctcccacagatgaaaagtagatgctgttttagttaaaaataaatggagagaaaaacttcaaggtaattaacctagatatttatttgtatcactgctgtgtgactgtcaagtatttgtcattagtttgtacacacacccagccctactctcaaataagacaaagagatgaatatactgcaagtgtgtgtacaccatggggaagggctggaggtgtgtgagcactataggacctataggcagcctgtaattgtcatcacctatggacagagggattaagaactctgtaatcaccaagatccccagaattgttaacaacttgtcttccagatagttttcatcaaagatgctattatttcagtctccttcttttactttttaggtggtccgagacattctgctgattggacatagacaggcttttgcatgggttgatgagtggtatggtaagtcaatttctccaaaataacttgtagaacaacttcatgttgtctcgggctttctgtccatttggcttcaactgctacctagaaggacaacaacaaaggcaaggccgctgcttcctgtgttggaaatagcactgtctgccaagcataatgaagatgtaattatagaagcttggtctaaaataaccacagaattattgactaagtaggaacctcaggatgtttgatgcttacatagttgatacgcatggctccatcattctctgttagatgggtttcaaacccatcctaatttatcccaaacttcaagatcaaagctgtctgaagcatcctgtcaagtaaaagcagtcctttgattcagacaacatttgaaaccaccccttgccgggcgcagtggctcacgcctgtaatcccagcactttgggaggccgaggcgggcagatcacgaggtcaggagatcgagaccatcctggctaacacggtgaaaccccgtctctactaaataatacaaaaaattagccgggcatggtggcaggcacctgtagtcccagctactcaggaggctgaggcaggagaatggcatgaacctgggaggcggagtttgcagtgagccgagatcgcaccactgcactccagcctgggggacagagcgagactccgtctcggaaaaaaaaaaaaaagaaagaaagaaactacccctcaacaaatatatacaggttctgcaagaatttaagggcagacagaggcataggtgccccgttcatcctaattgaaactattgttctggcttttttttcatgatctgggaagagttaaacaatttctacacatttgcagcaaatgaaaacaaggttagcttcatcccatgatggatggaccatccttcccaggtcctcagcagtcttgttttgtccacatgaattttctgcactcccagaatcagtcatcagatggctaccgtccttggctataaatagaaaggaacacgccccaccggtgacttaggttagatctgattttcaggtcgattgtctaatgaaatgcccttctccttggccttttccaaagtcacattaaatttgttctgagtataacctagattgcattttggtccttttctgtcattgtttcaccaactccctcccttttctgagcagaaggtaccaaagtaaaaggacacgttagacggaaggggcaaagacagtcattattattaatattgttagctatttctgagccacatttaaaaggcatggttctataagctatgggcttttcttttttttttctttttttcttacctccttttgcagttttcccagatctgcaccttctgaagagcaaatgcaccttcctgggtttgtccaaatgcagatcatttatgctctcttatcacacacccacagaatgccgctctcataccgcaaaagcactggcttgccacattgtcatgtagtctcccagagacctgtctatttctagttgtgttttgtgaggcaggcaggagagtctcctgtgattacttcctctgatccttaaataaatctttctggttgtttttttctggggcgcttttctccgattctcagagggagcacagaccccaagaaaggataagaacttctggtctctcccagcttgtgctcctcagagctcatggtttccttgctaccaacaccaaggaaatatcaaaaggatatttaaagaatcataggtgcaaactgattagaagtttggcaaaaagagaggtacctgaagggccaaaaatctgccactttgaaaaccaacacacagggcacttggataggtttctctctgttgccagagtgccaaagaagatttttcagctaaaagaatagccgggctctgatcaagaggacagaataataaaaagggtttgattagaggcaggatataggaagaaaacccagtgtgggtgggtatctagtaaatgaaaggccaggaaggcgatggggcctgacttttccatctcagctgagcctagggcaaggaagagacttagggacttctttttttttttttgagacagagtctcgcactgtcgtacggactggagtgcaatggcacaatctcggctcactgcaacctccgcctcccaggttcaagcgattctccttgcctcagcctcccaagtagctgggattacaggctcccaccaccacgccctgctaattttttttgtctttttagtagagatggggttttactatgctggccaggttggtctcaaactcctgacctcgtgatccgcccacctcagcctcccaaagtgctgggattacaggcatgagccactgcgcccggccttagggacttctaataaaagacttagggacttctaataaaaattgaaagaaaaaaaaaaactgccaggcacggtagttcacacctgtaatcccagcactttgggaagcctaggatggaggatcacttgagcccaggaattcgagaccagcatgggcgacatagcaagacatcatctctacaaaataaataaataaaattagccaggcacagtggtgcatgtccgtagtcttagctattcaggagaccgaggtgaaaggatcacttgagcccaggagctggaggctgcagtgagctatgatcgcagcactgcactctagcctgggtgaccgaacaagacctcgtctctttaaaaaaaaaaaaagaattctgggattacaacaggagcccaaggctagaataatgtatcaaaggaaacaggagatctccccgaatctggagaccttcaaaagagagcacttatttacttaggatgagtgaagtggaggcatttaacaactaaggagtctattgtgcaaaaaaccttttccttatctgagcacaaaacaacactgtgggctttagtgaatgtggatcattaggacaccttgcactccccagagtgggtctccccctgcatacactgacatagccccagccaaaacaagcagccttttcactcagcagtggtctgagaactacaccgttaatttcatgtaagcttctgcaaccatcagtacccacagctgagctgctgaccaggaaaacagtggctccttcatcacacagatgcagacactcagtgaatcaaatgaatggaaatgactcctgtccacagagtgccttctcagtcccatattcaaagtaattctgggaactgtgggccatatgtgccactggtacccaggctaagcgcccaccagcattacccttccactccattttggggtacctgaagtggcctatttttatttgttctggacaggctcagtgagactctcatggaaacatggaaacatggaaacatggaaaagatccaaaataaatccttgcctatagctatagcgtctagcactggttctcaaagtaaggtccctggacctgcaacgtcagcatccctagggtacttgttagaaatgcatattctcaggccccaccccaaacctactgactcagaaactctgagggtctagcccagcaattgttttaacaagccctccagatggttctgttgctggctaaagtttaagaactactggcttatagcatgggctataaaccagactgggacattgggttgtaaggaccgtttaattgattcaatccaaataggttaactagagaatcatagctgtctgcagggccaaccacactccagcctgggcgatagagcgagcctttgtctctaaaaaacaaaaaataaaatcaattttaaaatgattgcaggaacccaaattcttacaactctgatttcttgtgagaattagaaaaaaaagcttccctttagacagatgaattagaaaaaggtgccccttctgggcagactcagcaggtgctctgggcttagggctgaatttgagccccatttgcctcctctgctgtgtgttcatacagtgcacaaactgtacacactgatgcatgggtagctctagatgtctttctctctaattagacacaccacctccagtgcttaattaagagtcaagaaaaaaggacattgttgagggtagtgatcatttgtcagccaaggatgaattttgtatctcttctgagtttcagcatttggctgtcacgaaactgtttccctaaagagattttattctgttcgtgttcattgtaaagtgtaaccatttccatattggaggagttgagtgtgtctttcaaagccgtgattggtctttatccatgagccttgggtctctctgcacgactagaacgctaatcagagaaataacaacaacgtatttcaggagatggggtgagagggaaggtggataaaaataggcagcccagtttcacaaaggcttggttttgctttacaaatctgacagtgttttgagaaaggaacacagaacattgccagaaggagcctatgattgaggtgaacctcacgaatgtctttgaaaacctgactctaaccaaaaagtatgagggagggagagttctggctgctgtagacgacactacctcatgaaagtgacttagaaatcagcctggagtccctagagcaggtctaacaatgagggaggcaagattaaaatggagaaagaagcctgctaggggttgcatgagctggttgagttcaccaagccagattttccaacgcaacattttatgtgtgtgtgcttgtattcgtttatctggggagagaatgaataactttccatcagattttcagaggaacctgtgaacccttcccctgcctactccctgctcccaattaaaaactacagaaaaaaatcacaactataaggctggcacggtggctcacacctgtaaccccagcactttgggaggccaaggcgggcagatcacctgaggtcaggagttcgagaccagcctggccaacatggtgaaactccgtctctactgaaaatacaaaagttagctaggcgtggttgcgggcacctgtaatcccagctactcaggaggctgaggtaggagaatcgcttgaacccgggaggcagaggttgcagtgagctgagatcgcaccattgcactccagcctgggcaacaagagtgaaactctgtctcaaaaaaaaaaaaaaaaatcacaactatagattacagttctagatcttagtggtctgaattatgtggaaaaggtatacaccacacttcgaggactggctactttcactacaaaaaaatggagtcaccctaagctttttgtaagaagcatgtattgaatttgtaatcattgtaaagggtttaaaaaatggcatttctcaaaggatggctaccattttgctggagccaaagaagtatccattcttatttatgatttctggggcctccctgacccaactacttgttcaagacttttattttgacttagaatgatgtaaaaatgacttctgttttggtgaaggaggctgaaagtgaacggaaatgtttgtagagggaaataaagtataatgtgccatttcacagatcattgaattagaacagaagactcccctttttaaaatgtttgctgctgcaactgtgtggtacaatgaaggaaaattcacgcttgcagatgctttgttcaagggcatttgtagtttccatgtgtgttcaactgacttctaaaggcctttcaaacatatgatcttgcctccacttcctgtgaaattaacctcctttctttaaaaatacaatgatttaaagaaaattgccaccataaacaaagctaaaagactaggggaaaatatttgctgcatatgtagtcaacaggattaccatctataatatataaagaggtcctataaattgaaaatttggccaggtgtggttgttcatacctgtaatcccagcactttgggaggccaaggcaggagaatcactcgagctgaggagtttgagaccagccctggcaacacagggagaccccatctctacaaaaattaaaaattagctggacatgatggtgtgcctgtagtcccagctgcttgggaggctgaggtggaaggaccacttgagtctgggaggtcaaggctgcagggaactatggtcacaccactgcactccagcctaggtgacagagcaaaaccctatctcaaaaaaaaaaaaaaaaaaaaaaaaaatcagtcactcaagaaaatggtaaaggatatgaataagtaaatcatagaagaagaaatacaaatagccaataaacttactagtaatcacaagaaccgtaatgagaaaaacaagaaaataggacatttgcccatctgatagcaaaaatttaagagtgattatatccagttttcaatataaaatgataatccaatttaataaaatataccatagaaatgataagcacaaacaacttatgacccagccaatccacttccagaattttattctggaatacacatgaggccaggtgcagtggttcatgcctgtaatcccaacactttgggagaccgaggcaggcagatcaccttaggtcaggagttcaagaccagcctggacaacatggtgaaaccccgtctctactaaaaatacaaaaatagttagctgagtatggtgacacgtgcctgtaatcccagctactcaggaggctgaggcaggagaatcgcttgaacctgggaggcagaggttacagtgagccgagatggcgccactgcactccagcctggggacagagtgagactctgtctcaaaaaagaaaaaaagaaaaagaaatacaaattgcccatgaatacatgtacaacaagtacaaagctattctgtgtggtggtgttcatataagctaaaaattagtctcagtgtaaatgtttactaacaggattatcaattaacaaatcccctgagaccagagcctctttgccaaagtggagctgatggttgaggaggagattttggcctcagcccagtcactggcagaggagaacgttctactcaggccccatgcagtatgacctcacgccctgagataagagtctgggatctgatctctcctcacctgaaggagagcaagaaagagaagaaaagaaatggcctctccagagggcaaggaaaggaaatattgtcccactgaagtacagtgagcagggcatgtgtgttcccaaaatacttcccagggctgtttaacctctgatagcagagtctcaaagatattaggatgcactttctttatcagaagaaataccgtaccagttgcaatattctcttaaattaggcaattatccccagtattgctggcttaaggagtctttatgtaggaaaccttatttaggaagagtaaattatgacctttcacaatctataagtgaagggctgactgtttaccaatgtatttgcaaagtaattgacatgggcttcctttaattaagagtttgggccgggtgtggtggctcacgcctgtaatcccagcactttgggaggccgaggcgggtgaatcacaaggtcaggagttcgcgaccagcctggccaacatggtgaaaccccgtcactactaaaaatacaaaaattagctgggtgtggtggcgggtgcctgtaatcccagctacttgggaggctaaggcaggagaatcgcttgaacccggaaggccgagtttgtggtaagccaagatatcacaccattgcactccagcccgggtgacaagagcgaaactgagtctcaaaaaaaaaaaaaaaaaaaaaaaaagagttgatacacataagcatttgtttgctggaagcaaagaagtctgaacctaaattgtttgaagtcactctgatcattgaaaatcaatcaataataaagatgaatcatcattactgtataatctgtcattgggcacatgtaactgaatttactaaaatattgatttctacaaagattttgaggtcatatatgttgcaaaagctagacagtgcattttaccagctaacctgaacaggagcattttcacttgattaggatttccataaatttctgagaaatactgaaaatatttacatcatgttcatacacatttatagtctgtgaggatatttcaggatttagacaaacatattttccttcacagcagggaccatattatcaccatcttttagagaactactctactaggaatgttcattcctatgtggcaaaattgggagattttcttttatagaattttctgaaatttcatttcttaactctttgtttaaaaaaaataataggggatggctgggcgtggtggctcacacctgtaatcccagcactttgggagggcgaggtgggcggatcacttgaggtcaggagttcgagaccagcctgaccaacatggtgacaccccatctctactaaaaatacaaaaatcagccgggcgtggtggcacacaccagtaatcccagctactcgggaggctgaggcgggagaatcacttgaacccgggaggcagaggttgcggtgagctgaaattgcaccagtgcacttcagcctgggtgacagagttagactctgtctcaaaaaaaaaaaaaaaagaaaagaaaagaaacaggggattatgtttctagagtgaacagaaattctggaaaagtctatcttctccttaccaattccaaattgacggtatccatctcataatgatccaaaataacaaattttttttttttttttgagacagagtcttgctctgtcgcccaggctggagtgcagtgacatgatcttgactcactgcagcctccgtctcccaggttcaagcgattcttgtacctcagcctcctgagtagctgggggttacgggtgtgtgccaccatacctggctaatttttctatttttagtagagacagggtttcaccatgttggccgggctggtctccaactcctggcctcaggtgatccgcccatctcggcctcccaaagtgctgggattacaggcataagccaccctgcccagcccaacataacagattcttaaataatgtttttttttttcttttccacaagcaacgcatatttgatgtagaaaatttcaaaaatgtagataagcaaaaagaaggaaattaaaattacctgtaattctaactcttcaaaataatcactgttaacattttgaaatatatcctttcagtgtttttttaatgtagataatggttttctgactaaattgatttcatatgctatatacagttctttttacctattttttatttaacaatagattaaggatatctctctaggattaactattcttctacctaatttttaacaattgcatagtgctatcagtcccctgggttgttttcaatttttcattattatgaacattgctgaacaaggcagcaatgaatatctttgttgttaaaccctttttcacatccataaaatggatacatctttgaaagcccatagtcacaaagtttaagcccctatcttgacgttgagctaattcaagatgaagtatgatttctgtggggattcaatagaacaaaaaaacctataactccttggcttttgttttccaaattactgtcatgcctgttgggatggtggggggcaccccctaatgacatatgtgtagagaaacttctttaaattttcaactcctagctaaaagtgatcgtctagtattatttcagatatatttgtgtttaagaaatgttgataagcagccattgaaagtgattgtactgaaagaatgtgttgttattattaactaagatgcatttgttttcatcataaagcagcatctctttattgctttttggttacctcgattttctaaaagaagagcatgctccttgcttggccaagctgctgcttagcattcttgatacttacattgcttatggaccgcatttgcgattgaggatctccaggtatacctgggaatgatcttctgcataaaatagaccaggtctggatttagaggcacacagcatcttggtcccagaccacagtgaattaaatcataaactcctggcaaatctgccctttggaaatgaagaggatctcacatgacacatggattgatataaaaagacaccaaaccacatgatgcagaaaatacctaaggaaaaattccagctgtgaatgcccactctaaatccccactaagccaattagtggtcagggtggcagaggaagcactttgttcggcataccatcattggtaaagagcatgaagttccgctctgccaagagagtaacagaggaatgcctacctgggaatattgctgataaaatgtaaaataaccaaggagccgggtaggggtgggggtaaaatgacagaagtatttgaagtgagactaattgttatttatatgcatttcacatactgaaggtggatgggttccttatttaagttttttttgtttggttggttggttttttttgagacagggtctcactctgtcgcccaggctggagtgcagtggtgtgatctcagctcactgcaacctctgcctcccgggttcaagtgcttctcctgtctcagcctcccatgtagctgggattacaggcgccctccaccatgcccagctaatttttgtatttttagtagagacggtgtttcaccatgttgtccaggctggtcttgaactcctgacctcaattgatccacccgccttggcctcccaaagtgctgggattacaggcatgagccaccatgcctggcctgaacatttttatcagttggattaagacagggtttctcaactttggtactattgacattttggaccagataattttttgttgggggctgggggtcctgtgcattgtaggatgctccatagtgtccctggaatctgcacactagatgccagtagcaccccttccctagttctaacaaccaaaaatgtcacaaaattgtcccccgttgagaaccactagattaagagatcattatcctgaaatactgaaaaactgcagacttgggccaaaaatcatgtcatgtgccattttatttttagatcagtgtgggtggaagtagtgccagccatcttcaagctgttagccaagacttgaggttcagtatagacctgcactctctgacgccatgcattctgtgcaaatttacatctgtgtgcaagttgcaccaaatctcaattgtaccagtgaatatcattgctctgccttctacatcctgcctcctataacagcaatgaaagtgtcctttctgttgttgaatgcattgatttaaacaacctctaaatctattttgaaagctatgtggaaggtaagtattaaaccaagcaaaactgaccctctgtccccaatgggatcttctaatgatgctttaggagatctcaggctatggtactgcccacatgctaatactttctacccaaacctagctcactttacaagaatcacccctaaataatttccactcttctctgttctaagactattttgacttaacttccttgccctcactccccctttggttggtttagctaactttatgacttactcatcataaagttagacaagtctctgcttttttaaacctccttggctactgctcagctaccatctttccctaaagtgtccccattgaaagtttgcatctaataacggaagttgccaacatcttgacctctttcagatatgacaatggatgatgttcgggaatacgagaaaaacatgcatgaacaaaccaacataaaagtttgcaatcagcattcctcccctgtggatgacatagagagtcatgcccaaacaagtgtacgtagaatttttaaaacatgttgcccaccctttcacaaatgcacatgtaaactgatctgggaaatactgcagatgcccggttcgcaaccttccatagaaacatgtcgtcacccagaccctgttgctgcagaacctgagctggatctaaattgggcagtgtcacctctctcttccagacatttcgatcccttaaagttgcttgacgtggaggttatttcggtcataaaaccaagaacatggagagtggaaacacttttgtgggactagtaaaacggcctgcaccataaaagagcagaggagtgaaaatcgatgtcatatgtaaactagaataacatgtcagtaacttttaaaaacatagctaacactcacttattcattcaagggagggcttctggctcatcagctattttaggtttctttacatttgctttgaaaagctttctgtggctctttatagctgttttacccaatcagttcctttttacttaggataatctcaagatgggctgcagtctgtgcagacacacaggctgagcagtgaaggggtgtgagctggggatgtgctgagctgcctagcagatccctgggacttagggtaagccttagagagcctcagttatttcgttgcacactggaaattgagagctgactgtatattgtatgccagcattttaagtatcgtaatctctcaatcattcatgctaatgaagggtagctagagataacaaagaaaagtgtaatcaccaaatcatttctttgcatcttcagccagagctgtgatctctttgggttccgccttgagtcctcatgtccattagcccagtctccagaataatacatagtaggtgttaaaaaaaaaaaaaaaaatcagctgggcgcggtggctcatgcctgtaagcccagcactttgggaggccgaggcaggtggatcacctgaggtcgggggttcgagacaagcctgaccaacatggagaaacctcgtctctacttaaaatacaaaattagctgggtgtggtggcgcatgcctgtaatcctagctactcaggaggctaaggcaggagaattgcttgaacctgggaggcagaggttgcagtgagccaagatcgcgccattgcactccagcctgggcaacaagagcaaaattctgtctcaaaaaaaaaaaaatcaatgctgtagttctaggaaatttagatgtggctgttgtcataaatggatcctttagaattgtgaagaccttctgattgcactttggaaatttttagttaaatttttggagcatgtctttggaatgtgccctgcaagtctcatgtgctgcaactggttgcatgtgattgcccttgaggttgcaagggccctaactcttctcccattttgcatgcagtgatctgatttgcaggaaactgttggagcaagaggcgtttcctctctatgcacagaccaattccagtaggacttccccctagaagtgctctttaaggaaactctccttgaatttctatcactttcaattaccttttcttttagaaatgttgggccccagttccccctcagccactctgaaagccattcactataaatatgaccaggcaaacaaaggaagaagccacaggtaaagaggagacaccagatggctaaaagatgctaagctcagtgattttctcacagcttataagccccttggcttggctttctttcagttttactgtgattattactttataattaaagtccatggctgggtgcggtggctcacgcctgtaatcccagcactttgggatgccaaggcgggcgtatcacctgaggtcgggagttcaagaccagcctgaccaacatgaagaaaccccgtctctactaaaaatacaaaattagctgggcgtggtggcgcatgcctgtaatcccagctactcgggaggctgaggcaggagaatcgtttgaacccaggagatggaggttgcagtgagcagagattgtgccactgcactccagcctgggcaacaagagtgcaactccatctcaaataaataaataaataaataaagtaaaataaataaataaagtaaaataaaaaataaagtccacttactatgtagaaggtgataacgtagagtggttcttcccatggaaaagcccacataatctctggctgcccctcagcgttgttcccgtgacttcagggtgaaagatgcctgccaccggagaagttacacaaagtggttattttgaatgcttatgacatttccattatcctttggaattccgtgaaattggagcacatttatttttccttagtctttctcctgtatcataatgaaaagcagtgaaaatcaggaggtggctctttgtcacaaataaaaactgcatgggtgctaaatgaattttagatcatcaacccaagcagggacaaattagattgaaattaggcaaaattaacatccatgaacacagcagtgaggaaataagtcttttcaattgagcaggttcaaagccttcaaggacgggaacttctaagagcctctgggagtggaaaatcaaaattctgtgctttagattatttctgccccctgctggctatgtggagtagaacaatgtattcagccacttgattaagaaagtctgctttttcaaagataatatccatttatcatagcaaaaacataacataccctgatacactaaaatttttctcagtctcaactttattgtgaaataaatgcctctttttatataaccttaatctcacttcttagctcatttaatagtcttccatgtttttaaaaattggtaagtttataggtacaatttttcttgatatatgctgaattttatatcttatccacatagtcataatgacttatatcctttgtaaaaactttccctttcagaaaattttaataattgttcccaggaaatcctcttaaggatttcattttgtgaaaaatacttctggtttgctcagatgttataaaacctaaagattaagctgggcacggtggctcatgcctataatcccagcactttgggaggctgaggtggacggatgacctgaggtcaggagttcgagaccagcctggccaacatggtgaaaccccatctctactaataacacaaaaattagccgggcgtggtggcagacgcctgtaatcccagctactcgggaggctgaggcaggagaatcgcttgaaccccggaggcggaagttgcagtgagccgagatctcgccgttgcactccagcctgggagacaagagcaaaactctgtctcaaaaaaaaaaaaaaagaaaaagaaaagtcctaaggattaatactgtgttatgaatattcattacatactcagtatttccaaagtggctatattgtttcctgctggttattccctccaatattatctaatgaagtttcaactgctaagtacatggcagtggacaagaaacaatgaaaaatgggtctctggggggccaaaacagatacagaaaatccgcgggcactaaattttgcattttgctccaggataagccttgggccttgactcagtctttaataagcccaggttcctcttttccctgttcccagcaagtaaaaatggcaaaggataccagggatagccagggtaacaataattaataataacagtaataaggctgggcacggtggctcaggtctgtaatcccagcactttgggagtctgaggcaggtggatcacgaggttaggagttcgagaccagcctggccaacatggtgaaaccctgtctctgctaaaagtacaaaaattagcagggcatggtggcacgtgcctgtagtcccagctattcaggaggctgaggcaggagaattacttgaacccaggaggtggaggttgcagtgagccaagatcacgccattgcactccggcctgtgcaacagagcaagactctatctcaaataaataaataaataaataaataaataataacagtaataatagagtttctgagcatgagagaagagatatcaagccataaagagcaaatagaccctgagaaggaactaaggaactgtatttttgcacagtgatatatcttcaacatattatgtctcaaatgtaggaagtatgtataatacattaaacacattagggaaagatttacattttttaaatactgtttttactttctcacttaaataagaacatttcaggtatttggaaaacctacattatccaacaatgattattaacagtggtatcactgtcttatttgttgaattccaagtcatgcttttttttcttttaaatagaatcctcactattaaatgatcctctcctttcattctctattctttttaagtttcctcaagaaatggttttattttcttggctttggaatgattagcagggtgtggtgaaattgttgatttacgtgtttttgaaactgaatttattaaaacacaatctctgaaccttcttaggatcgacacacagtcaggaaaccagaaacaacagcatctttgtggcccctcagaataaaaaagtatatgtattgattaagaagatagcatgttggcctgagtacagtggctcacgcctgtaatcccaacactttgggaggcttaggcaggcggatcacttgaggtgaggaattcaagaccagcctaggcaacatagcgagaccctgtctctacagaaaatacaaaaaaattaaaccaggcattatggcatgcacctgtggtttcagcctcacggggccctaatgcaggaggatcacttgagcccaggaggtcgagactgccgtgagtcatgatcgcaccactgcactccagcctgggtgatgcagtgagatcccgtctcagaaagaaaaaaaaaaaagaagatagtatgttgaaaaatcctgatgatttacctgtttaccctataaaggtatactttcatgatctaaagttgacaataatgacaataatatgtgtcatttcagggccattgattgttttaattaccttctctttatgaaaaatatgaccagttaattatagctccaaataccccacaccagacccacaacaacacagatgcacacgggtgcacacacatacacacacacaggcacatatttcccccgtctagttctgtattctactgttaagtccttattgagaatacttaaaatactcactgtgaagagtgctttggaaaatcttaaatggataatcataaagggatattgttttcagggtgtagcttccaatagaaaaaattgggggtttggtatttcaatgatactttgggtgtataatcgggagaggcccctttatgatagggttcccatagttcctgtaaaaacaagggtagtgatgaatctatttgcctctcttataaataactgctcgtttttctttctgtttttctccttgaagacatgacaatggatgaagtccgagaatttgaacgagccactcaggaagccaccaacaagaaaatcggcattttcccacctgcaatttctatctccagcatccccctgctgccttcttccgtccgcagtgcgccttctagtgctccatccacccctctctccacagacgcacccgaatttctgtccgttcccaaagatcggccccggaaaaagtctgccccagaaactctcacacttccagaccctgagaaaaaagccaccctgaatttacccggcatgcactcttcagataagccatgtcggcccaaatctgagtaactttatataaatatctcatggggttttatattttcatttgttgttgttgtttttttttaagaatcttctgatagagaaaaagactgctttgtcactcaaacatgttccttcgacctttcagtgtgcatgtgactcagtaacttcacatagaatatgattccctaagtatgctacacagcatcatattagatgtaagatgtaagacttgcaaaggacagaaggaatcttctgtaaccacatagctgtatgccagagaggaagccttgttattgggcatttgatgaggtttggcatggacttcaaggataaatgaatgaaaactttgcaccacttttgttacaaggtacggtagaaaatagtgaagtcagtttcctctcatcaaatctaaaattctccaaaatactctcaggcataacatacttagctgttaaattttgaactgctaattactaatacttgaataccaatagttactgagattcctattttgtggttagtctgactcaggatttggagcctaattaactctaaacttttgaaaattttaatcatcaagctatagaggctccaagtgcaattaataataactcatttataccttccacagaatttaataaagattctacttgtttctgtcttttaataactttccccttttgtgcccttgtggcctcagaaatccttaagaattgcatggatgaatgtgaccataactgattttggaatggttcagtttaggaaccaagaggcccaggtgaggcaacatcttttttctctacaggtaccaacaaaccttgacttgtcagcttccatcatcaattaagattctcagaatttgcaattaattgaatagaattcatttactatctgcccactcaaagaagtacaagggtagagtaagctaactgggctttaacatggtcagaatgtctggtgcatgaactataaaaaagagaactgtctcccatccccttccttgttttactcttagtaacatccagaattccctggaacagattgcctaccaccagaccttagaaaagactgtcattctcttgctccttacttgaaatacaaatattgggaatgtcacagacatcaagcaactactgtcaagtgggaggagagaatgagcagaattgctgactcctatttgtagagtgaaaaggaggagtgataatagatgcccttctgtctagctttcctttcttcaactagtggtaatgcaagattagaatcaaggttgacaggaggcaaggtcactcactgaagtgacagaaagacaattctcctttgctccaaagagagaaatctgtcacctttgcacctcactgcctttaaacacagacgggagggcaggccaaatctcagcattgacttttgtcctccaagagaggaagagaagaagtaattgggcaacttggaggcccacgccccagctagccttcctgatcgtaacctccaacctcaggaaagggaccttcccaaaacacagatcccaaaggaaacaaaatagaccaaggagcataatctgcttctctcacacagcctctctgccagtggaccctgcctgcttccctctcagtgctcagcactctgtgtagtgtctttcaggttgatacactctcccaaggtgcaggcgctggccccatgagcccagcaccaaagttttctaagtcataggtcagactgtcaagatcatttctttatctataggttgatatttagcttaaaaaaaaagaataaacctagaactcaaaggaaacctgttgcaaatagcttagatcaacagtgtatctcttccctaagaatgatagtatcttagtaagacaccttctatgcatggtatggaagcatgatttttgcttgtgggaaaacctaatattttatcagacccctcggacttctcaatccctccctctccacacagtagtacttaatgaaaatgttttgctttagagagcaaaatgctactttcagaagacactgaaatagtatatgtatttgcttaccatttgcaagctaaaatcaaggtgggatggggtcattattttcacatagaatgtatttattttgtgcaggctgttaaacacatctggcacctagtttttccattaagagcattgctattttccctttttataaagtagcttctgctgtcaaggttaacaattctatatgctttaggaagctaagttctaatttccttttgtgagtttcatttcttttataaccagtatgttaccacagacatcagttgcaaagctacgatgatagtgtgattcttagccgaaaaaaaagcgtgtgctcttaaagtatgttcagtttttctgtctacatatgctttgtgtgagttaaaaagggggtgggtggtgtaaatattcctttagctgctttgcatatttaacccagtcatcaaaaggcataaatgacttcaatattttatatatcttggttttcaagtatcatttcacattctctatacatgactttgttattgtggaatacaagcctgcaatggatgtatatatacagaacattaataattcttagaaggatggaagccaaatggctgcatgatggaaattagaagaaaaaaaaagcagaaacttgaatttgctaagcatgtttggggggaaatagaatccttaactcagtgcctctgtctgcgatatggaaaccttcaactttgttcaccaaaattgtattatacctgtgtatatatatatatatatatatatataaatataaatatagtatagtgaatcagacaccatcagttttaagtctctggtagccaaacttaaataaataatccatagaatatcacatacgttcactccatcttcatctctgaagttagtggagaccatcaaaatgactgtacatttcataactctgggaagatttcaaatgtgaagtgcccctgtgcattttcttggccatagcacggcattcttgctttagctgtgctttcctgggatgagaagatcttggtgtatttaacacataagctttgttagaaatcacctctgaagatcatttcattttctcactttgggttgttgcaagacaaagcaaaggaaaaggaacacaatgaaggaggccgtgacatttttagttgccaccgttgtaactcaaacaatatgggtttgttggtgaactgatttatcaaggcttctgttacggttttgcatctgtgtgtgaggaaaattttaatttatttggaagtatttattagccatgttgttggtcctgaaaataaatctctaagtagcacagttgtgggtatattatgcagacacttaccacaatacctgcaaaagtaactgtggttttctttcaagacactgtaataaacagtgaactaagagaatagattctgatacatctcgataaatcattctctgcaaaagtttcagggctaatgtatttatgtgtatttttaaattctactttctttggcatctcttcatggctcagcgacaacaaagtaataggtcattggctggcttacgtcgataggaattttactcttaagaagggccagtgtatagctgactctacatataatgtgtaatcagataatccaatagagaggaattgtccaaatagttttagtacctttctgatcatctgactcagtaggctaggagacaatctgtcatctgagccatagttcttgagatttaaaaagtctgtccagtgactgcaatctgattatgaataaactattttaactattcattcttgctgaaactgaagtgtacacaatagcacactgttggcatgctgaggcaaaacattgggttcttttgtgttctaccttcaaaacaatctgtttgcatttgaaatataagtgtttaagctttttaggagttagtgtaataagagaatgtgaatatgttgggaaattttcagatgccattaataattgtaattttgttgttaaattaacaaggactttaggataagcctcttgatgttttttgctttaaattgaaagcatgtctgtcaaattgcaagtctcccttcagtttctatatatcacccaggagagggtctctgagttggtgttgtacctgtaccactcacatgtagctcaagtgtaatttgtagtgtttacattcaagctgggatcttgattggttaaattaatccacataccactgccactgctgaaggaccaggtgttggaatacacagcattacagactataagcaaagcaaacaaaagttgatccttacatatgccatccttctgtgtcattttgtggctgttctgtgtttttcttcctagttatttattattgttaataacttactttttcttacattctgttgtaaataaaatacaaagcaatcttctttgcaagcgtagcttcctctctctctctctcgctcgccctctctctctctctctctctctcctctttagctattctcgagggaatgttagtaattgttcacctgtgggttgatgggcttgcttcttttcctctatggatttttttacccatccccataccactgccactgctgaaggaccaggtgttggaatacacagcattacagactataagcaaagcaaacaaaagttgatcctcacagatgccatccttctgtgtcattgtgtggccttgcctgctagtaggcatatggcaccttcaggacccttggtaggaaaagtctgagtgtctgcactaattatccagccaaaaattacacaaggtggccagccaggccaacatggcgaaacaccatctctactgaaaatacaaaaatttcccagccgtggtggcacacgcctgtagtcgcagctactcaggaggctgaggaatgagaatcacttgaaccctggaggtggaggcttcagtgagctaagatcacgccactgctgtccactctgggtgtgaaagagcaagagcctgtctcaaaaagacaaaacaaaacaaaaaaaccctggctgaggccgggcgcagtggctcacacctgtaatctcagcactttgggaagccgaggcgggcagatcacgaggtcaggagatcgagaccatcctggctaacacggtgaaaccccgtctctactaaaagtacaaaaaattagccgggcgcggtggcggtcgcctgtagtcctagctactcgggaggctgaggcaggagaatggcgtgaacccgggaggcggagcttgcagtgagccgaggtcacatcactgcactccagtgacagagcgagactccgtctcaaaaaaaaaaaaacccgaggtgaatctgtaacccagtgggatactcatgcatccgtccaccaggtgcttggttccctcgcctcgaatgtgaagctatccaccctgagggaatctgtaggaacaccatcccagtggtgttcctagattctctccactgaaggttgggccagtttttaaggtgagctgaaatcactctgatgtggtttctccatctcaggtagctcctgtacacaaaagggttctctgcagatgggtagtctgaggacagaaacttttatttctttggggttttttttcgagtctcactctgttacccaggctggagcgcagtggtgtgatcacagctcactgcagcctcgacctcctggactcaagtgatcctcctgcctcagcctccagagtagctgggactacaggtacacaccaccacaccaagctaattttttattttttctagagactggttaaactatgttacccaggctggtcttgaactcccggactcaagtgatcatctcgcctcagcctcccgaagtgctggataattataggtgtgagccaccgcacccagccagaattactttctagccccctgctcgttagtctcctgctaaaacagcatatacctctcactctgttctctcctcttgaatcatccacatcctatgttctaatctgtgactggatcaggcacacagcttcatagaatagcacaccatcagtcggctttctacactgaaaattttcccaaaatcatattgcatcgttccaatgaacaaaaacatgcttgcttttgtagctccaacttcaccattaccacccccaacctgccttttacttcttttttcaaaacacacaaactttccacacattgttgttggctgactttcagccagtgaacttgggtacagccaggctgggtgtttattcccgggaccaaactatatgggtggttaaacatttggatgcctaatgttaaatatatatatatatatgtttgtatcacccccagcttcctactacagcttttcatcaaggcattatctcatttgagcattactctttagatttccaaacgcccacattcttttctaaaatgtccttgtttcggccgggcgcggtggctcacgcctgtaatcccagcactttgggaggccgaggcaggcagatcacgaggtcaggagatcaagatcatcctggccaacatggtaaaaccctgtctctactaaaatacaaaaaattagccaggcatggtgacgcggcactggtagtcccagctactcggggggctgagaggcaggagaatcacttgaacctgggaggcaaaggttgcggtgagcagagatcgcaccactgcattccagcctgggtgacaaagcaagactctgcctcaaaaaaaaaaaaaaaaaaaagtccttgtttccttcattacattctacttggggtttcttgcctctgacctccagctgcatcttggcctctcaagttcaggaaaatcatgcgaccattctccaaccctgtcgtgaaatatccctgtatgaaaatatcaccctcagccgggttcagtggctcacatacctgtaataccaacgctttgggaagctgagacaggttctcttgagtccagaagtttgagaccagcctgggcaacatggtgaaatcccatgtcttaaaaaaaaaaaattaaaaaaaaaaaaagagaagaacaaaaatgtcaccctcagtcctgaagctttgacgcctttggaacaacaatctttgtgcatgttcacatacagttgtgtgtgtgtttaactcagtgcggttgatccaggcaaaccctgttttccagctgacagactgactttctctgcctaatgtacctgccccctgacatttcatcctcccataaatcctcctttttccatagtatgcaacctagtaggatatcccactcaaatccaaatcttcaagtgcttccctgctcctgggaaagttggaagcaggctgggactttgccttaatgcttttgctctgttcccagcactgaggaatggagctagcctgtggccaaagaaacgacacagcctcagaaacctactgaatcagccattcagtgaagcaacattaacgggctgaattaagcacctgggatttaagggctaattatgtttaactgtaagtaccaactttccgcactgtaagcagacacaaaagacagggccatcatttcccctcctttagcttttgtagaagggagttttgaccgctttgtccctggagcgtatttgagggtggccaaatctggacttctgtgattttttaaaaaaaaatcattccaaaataactttcttgctcccaagagattccacaggcaagatgctggcagtttacagctcattagcaacccttgagaatcattttgtgctcttaagcataccagtgattatattcagagtgttcagagacagcttgctgctttctctgtgcagtcagtcaacagtactgaatgcatattttgtcttttctcagaatacaacttgaaaatttacaaagattctacaagtttaaattttcccactgtcatcttacagttaactgtatttctttgcattttgctaaaaatcttattatataaatccaagaatgtgacttttcaccttaagtactttagaatttttctgtagagcataatccgtacatgcctgtctttctacaaaatgctttgaggatattgaattgttttataaacacctttacatttggtacatagcatgtttatcatttttcatagctatataatattccattgggttgaaaatcagtaacttacttaaacattcctttattatttagcatttaggttatgttccagattttgttattatatacagtgccattaggaacatctttgcaacatagcttatgtcttctttttaattatttgttctggataaattcccagaaattgaattactgggtcaaaggatgtaagtattttcctgacttttgggtccttactgccaacatcccctccaaagaaaattataccaatttacaattccactgacaatatgtgagtgagaacatgtgtctctttaaacaagtatttgccattgtaaaagttcaccagtctcaacttattaagcaattgccagcatccaatttccatacaagtcttttgttaaagtattaataggtcaaatatccttattttgggtagtcatgtgatgaagggagagcccagacacaaagaagctctccgaattatttaaatgttcagtgccttctccagcctagctagcaaactgtagaaacatttgactggctactacagaaacaaaagcctaacttgagcataaggaactgcatttaattgaataaacaaacatcaattctaagtcattttgttttcacactttcagggataacaaacattgaatgcatctttttatttgaggttttcctgaaaaccaccatatacgtgccaacaagtttttgggtttttgcttttttttttttttttaccaagaaggaatcagttaaaaaaaaaaaaagaaagaaagaaaaaagaaaagaaaaaaaaactccagctctcttactgttattttagaatcagtgattcccaaattctagcagaaccttggtaaggacaaagcagagtccctcctaagtctttgatttaacttctcgggaagcaacgtgatgacagatcacacatgtgctccaaaaaagagaagaaacagttggtacatagcacccttttcagccacgcgcaagccattcctgaggaatagagaattctccaccaggagagtactatgctcatttctcatacataacgaggaccaggtataaaatttacactcaagttagtttggaatctgactgcagtgtttactttttttttttttttttttttgagatggattctcgctctgtatccctggctggagtacagtgacatgatctcagcacatagtaacctccaactcccgagttcaagtgattctcctgcctcagcctctaagtagctgggattacaggtgcctgccaccacgcccagctaatttttgtattttttattagagacagggattcaccgtgttagccaggctggtctcgaactcctggcctcaagtgatccacctgcctcggcccccgcaaaatgctgggattacaggtgtgagccacctcacccggcccagtgtttactgttttattgtcagtgttgggtgtttattttaattattttgagataattatagattcacaggaagttacaaagaagtatacaggatggcctgtacacccttcacccggcctcccctaatgataacatcttgtataactagtagtacaccagccgggcctggtggctcatgcctgtaatctcagcactttgggaggccaaggcgggcagatcacttgaggtcaggagttcaagaccagactggccaacatggtgaaaaccctgtctttaccaaaaatacaaaaaaattagccaggcatggtggcaggtgcctgtaatcccagctacttgggaagctgaggcaagagaatcgcttgaatccaggaggtggaggttgcagtgagctgagattgcaccactgcactccaacctgggcgaaagagtgagactctgtctcaaaaaaaaaaaaaaccaatagtacatcacaaccagggagttgacattggtacaattcatagagcttatgaagatttcaccatgggcaggcacggtggctcactgctgtaatcctagcacttttggaggccaaggtaggcggatcacgagcccaggagttcaagaccagcctgggcaacatggtgaaaccccgtctctacaaaaagtacaaaaatattggctaggcgcggtagtgcgtgcctgtagtcacagctacgtgggaggctgaggtggcagaatcacttaagcctgggaggcagaggttgcagtgagctgagattacaccactgcactctagcctgggcaacagagcaagaccctgtctcaaaaaaaaaatttcaccaagttacatgcagtcatttgtgtgtgtgtgtgtttgtgtgtgtgtgtgtgtgtgtgtgtacgcatgtgtatgcatgtagttctatgcaatttcctcatcaatatagcctcatgcagctatcactacatttaagatacagaactgttccatcactacaagactctctcatgctgccatcccttaccccaatctcccaaaatctttactttcaaaaacgaaaaaattttcacagaggcaaacagccacctcaattttttttctgctactttctaacatattcatcacaactctcaaacattttggggggcatttaaatttaattttaaaattaaatttcaattaaatatttttattgtaaaatatacataacatacaatttatgtatatttaagtatacgcaatttgtgtatattatgtattataaatctctcatgagacttattcactatcatattagcgttttgagacagagtctccctctgttgcccaggctggcgtgcaatggcgcgatcttggctcactgcaacctctgcctccaggatgcaagcaattctcccgcctcagcctcccgagtagctgggattacaggcacacaccaccacgctcggctaatttttgtattttggtagagatggggtttcaccatgttggccaggatggtctcgaactcctgacctcaggtgatcaacccatcttggcctcccaaagtgctgggattacaggtgtgagccaccacacccggccgcatagtagccatttttaagtatataattcagtggcattaactacattcacaatgttgtgcagccatcaccattatctttttttttttctttttttgagacacagtctcactctgtcacccaggctggggtgcagtggcacaatcagctcactgcaacctccacctccagggttcaagcaattcttctgcctcagcctcccaagtagctgggattacagatgtgcaccaccatacccaactaattttctatagagacagggtttcgccatgttggccaggctggtctcaaactcctgacctcaagtgatcctcccaccccagcctcccaaagtgctgggattacaggtgtgtgccaccatacccagccaccactattcattttcagaactttttcatcatcttaaacagaaactctgtgcccattaagtaataagtccccatcctgccctcctcccagcccccaaaagcctctattctactttctgtctctgcaattttgcctattctgtacctcattgtattagtctgttctcacactgctaataaagacatacctgagactaggtaatttataaaggaaagaggtttaattgactcacggttacacatggctggggaggcctcacaatcatggtggaaggcaaagaggagaaaggcacatcttacatgatggcaggcaagagagcggtgcaggggaactcccccttataaaaccattagctctcctgagacttattcactattatgagcacagcacgggaataacccacccccatgattcgattacctcccaccaggtccttcccacaacacgtgggaattatggaagctacaattcaagatgagatttgggtggggacacagccaaaccatatcactcatgtaagtggaatcctgtaatatgtgtccttttgtgtctgtcttacttcacttagcataatgttttcaaggttcatccatgttatagcatgcatcaaacattttaaagtcttattttatgggaagagggaaatcctataagccagtaaacatactgtacagtttgcttatcttaatctatttagtgttgctataaaggactactggagactgggtaatttataaacccacggtttataagctcacggttctgcaggctgtacaaaaagcatggcaccagcatctgcttctggtgaggcctcaggctgcttccactcacggtggaaagtgaagaggagccagcctgtgcaggtcacatggtgagagaggaagcaaaagaagtgggagactatggactcttcaacaaccagctctggaaggaagtaatggaaggagaactcacttgtgatcacaaggatagcgccaagccagaattcatgtgggatccacccccatgacccaaatacctcccattaggccccattgccaacacaggggatcaaatttcaacatgaagtcctggtgtggtggctcacccctgtaatcccagcactttgggagggcttggcgggcagatcacttgaggtcaggagttcaagaccagcctggccaacatggtgaaaccctgtctctactaaaaatacaaaaattaaccaggtgcagcagcatatgcctataatcccagctactcgggaggctgaggcaggagaatcgattgaacttgggaggcagaggttgcagtgagctgagattgcgccattgcactccagcctaggcaacagagcaagactccatctcaaaaaaaaaaaaaaaaattcaacatgagatttggaaggaacaaacaaaccaaactataggagtgcagcactagtaagcagaagttctctaattattagaaaacagatatttccttgtttttattttttttcttttgagacagggtctcgctctgtcacccaggctggagtgcagtggcacaaacatagctcactgtgacctcaccctcctgggctcaagctattctaccacgtcagcctcctgaatagctgggaccacaagcaagggccaccacacctggctaatttttttaatttttgtagagactgggtgtcaccatattgcctaggctggtctcgaattcctaggctcaagtgatcctcccaccttggcttctcaaagtgctgatattataggcatgagccagcatacccaaccagaccttttctagttattagacaacagacatttttctaatgctgtgtgatgctggacaagtgacttcatccctctgagcctttgtttcttcaactgtagcaacactaccattaataacaggtggcatatattaaatctgaatgacaaatatgtaaaaataagattgtcagtaggtgatggaagctgcggctgaaaaatcctgagaaaaatagaatgcacaggcaaatttcaacagtagctctaggccgagtgcagtggctcatgcctgtaatcccagcactttggggagccaaggcaggaggattacttgagctcaggagtttgagagcagcctgggcaacatagtgagacctcatctctacaaaaagtttaaaaattagccaaacatggtggcatgcgcctgtagtcgcagctactcaggaggctaaggtaagaagatcgcttgagcccaggagttcaaagctgcagtgtactatgattgcaccactgcactctagcctgggacacacagcaagaccttgtttctaaaaaataaataaataaacagaagctctatgagaaagagcaggtgacctttcctagtgctccatcagtacatgaagctcctttttaaaataagaataggctgggcgcggtggctcacgcttgtaatcccagcactttgaaggccaagatgggcagatcacgaggtcaggagttcaagaccagcctggtcatcatggcgaaaccccgtctctactaaaaatacaaaaattagccaggtgtggtggcaggtgcctgtaatcccagctacttgggaagctgagtcaggagaatcgcttgagcctgggaggcagaggttgcagtgagctgagatcatgccactgcactccagcataggcaacagagcaagactccgtctcaaaaaaatataaataaataaaaaatttaaaaaaaaacaaaaatagtccaggcacgatggctcacgtctgtagttctagcactttgggatgctgaggcaggcagatcacctgagtccgggagttcgagaccaggccaacatggtgaaacccatctctactaaaaaatacaaacattagctgggtgtggtggcgcactcctaatcccagctacttgagaggctcaggcacaagaatcacttaacccggaaggcagaggttgcagtgagctgagatggtgccactgcactccagcccgggagacagagcaagaccctgctcaaaaataaaaataaaaaataaaaaaaataagaataaggtaaaatatgtttctgtttgaaaagaactgtacaaatgaagtcagacctgcaaaacctcctttgttttcatgcatgcaagttgtaaaaataattacgttttactcctttaaagacaactaaatgagggtgcttagatcattaaatacacacacacacacacaaaactggctaatttcagatcatctggtgggtcaatagtgttttatactcagattcttttaagtaacatgacctgttattgtcagaatataaaaatgtcaaaagcttctcttttttctgatatactagatctaatttgcatctaaatgcaaaagctttttagcatatgacaaaacacccttgccaagctgatggacgacttttgagacagatctggttaatacacagaggccaacattttgttaattggatttgctaaacaatatctaccacagcctcactgaaactctttggtaattccttttatataagattaaaccaaacataccccgagaagcatacttatctttgaaagcaagcatcttccattctggatccaaatatgaatcaattattttcagtgttttggatagactctttttcccctccccatgcacctttcttgatgctttaaatgaaaaccaaggaaagatggtttaaaaagtaaaataccaggcctggcgcagtagctcacacctgtaatcccagcacttggagtctgaggcaggaggatcacttgagctcaggacttttgagatcagcctgggcaatatagggagacatagtctctaccaaaaatttttttttttattagctgggcatggtggagcacaccagtagtcccagctacccaggaggctgagatgggaggattatttgagccagggaggttgaggctgcagtgagctgtgtctgggtcactgcgctccagcctgggtgacagagcaacaccctgtgtcaaaaacaaacaaacaaacaaataaacaaacaaaaaaacagtagaatagctccaagtttccttaagggacaatctgagagcctttcttctcagagggagcactgacagccatcaaagggacctctaagatttcacataatattcttctcttgcctcccaattttaggcctttgcttttttactttcctctaacaataggtggtctccaactcactcatctgagttattaatgacccatccacacaatggctccttaaccatgatctcagccaccataatgcctgacactgggtctccaacaattaccctcaaactcacctctccactcctggcttttctgtggtttcctcgcctccagggggacaggcggagccacctctccttatctagtttccagcagataaagatgttttcctgataacccaagtggaaactctaaaaatgtgttcctgttgaaccatggccactgggctttccaatgcaaatgtgaaggcggtattgatcagcctttagctgcactaggcaggtttactggctgagctgagagcctagtttccctgctcagcactgccaccgagaaaataccatctgagttcaaaacaactagtttcaaaccaccttcagaaacacagctcttttatgagtgtatcattttgttttgctgagacgggttctcgctctgtcaccaatgatgctagagtgtagtggtgccttcatagctcactgtaaccttggactcctgggctccagtgatcctcctgcctcagcctcctgggtataggactataggcacacagcacctcactcagctaatttaaattaaaaaattttttgtagagatggggtcttgataacaaaacccaggctgattttgaactcctggcttcaagcagtcctcccacttcagcctcccaaagtgctgggattataggcctgagccaccagttttttgttgttgttgttttgttttgttctgagacggagtctcgctctgtcgtccaggctggagtgcagtgggcgatctcggctcactgcaacctctgcctccggggttcaagcaattctcctgcctcagcctcctgagtagctgggattacaggtgcgtgccagcacgcccggctacttttttgtatttttagtagagatggggtttcaccatactagctaggatggtctcaatctcctgacctcgtgacccgcctgccttggcctcccaaagtactgggattacagacgtgagccacggcgcccagccaaaccaccagtttttaatagcaggtttttaatagcattgatagctactaattggatatacttcaggaaagaagtcacctttttttggagacaataaatttaattttactggaattgaattaaatttaattccagaaaaaaaatttcttgacatgaaaatactacataaactacaaagctttatgaacatatgtagccattcttcttatttccaaatattaaaatttacatttaaaaaaaatctagatatagctaacatttgccatgaagacagcaccacctccaaaaaaattttagcagagaattggagatgtgtgtgtcaatggcaccaaatgtctcgctacttttctactcccttgattgctaagacaaaacttaagcaatttataaaaatacatttatacaaaaaaaaaaggtagtcaactagacatttaggtgaagaataggaccgatttatttgcagggctggttgagaaggagggctttaggtgcatccgttgtcttccatccacatgcaccctcctgctggctcctgctggggacatgaaggtgaaggattcccacagagttgaacaggagccgagcccagacccacctgagcttttcttcaggcagcagttccataaacacactcaccagtgcccacccccgtttgccacacctaatagagtttaggggtagaaggtatttaagcaaggccgggcacgatggcccgtgcctgtaatcccagcactttgggaggccaaggcaggtgcgtcacttgaggtcaggtgttcgagaccagcctggccaacatggcgaaaccccatctctactaaaagtacaaataatagccaggtgtgatggccggcacccataatcccagcttctagggaggctgatgcttgaatccaggaggcggaggttgcagtgagccgagatcgcacctcttcactccagcctgggtgacacagcgaggctccatttcaaaaaaaaaaaaaaagaaggtgtttagacagcctcaaacttcttcagtctcacccccaacatatcgggacaaaatatcaagttactctcctcctaggctgaactgggggctttaccttcagcctgcattccctctgcgccctccctgtgaattggctctcagggccaatttctgctttaatcctcattcctcattctggtcctgatagaacttattctataatcgggtattttcatcttttacttttttttcttttctcccttccctctcttcctcccttcctcgcttccttccttcgacagtgcctaacatgtaccagacactaggagaatggtacaaaagtgatcaaaaataaatctagggcctggcacagtggctcacacctgtaatcccagcactttgggaggccgaggcgggtagatcacttgaggtcagtgatctcagtgtttgagaccaggctgaccaatatggtgaaaccccatctctactaaaaatacaaaaattagcctgacgtgcacctgtaatcccagctacttgggaggctgaggcaggagaattgcttaaacccgggaggtggaggttgcactgagctgagatcctgccattgtactccggcctgggcaacaagagtgaaactccgtatcaaaaaataaaaaaattaaaaattaaaaaaatctgacctcagagtgtagtagaaatgataaataataattatatagtcacacaaatgtgtagttgcaacttcatacaggtcaatgaaggaatgttacatcatgctaggacagcatataccataagaaaagagggctgttcagcagaagctgtgatctgaaagacaagtggcagctagatgaagcaggaaaggaaatagcatgggcacagaggtgaggggggtgggcatagcctgttccaggttctgaagaatatggcttgagaaagaggacaagagatgtctgatgagggatgagccaggaaagaagggtaggggctagatcttacaaagcccttgtggtttagcaaataaaaatacaagatgccaggtcaaatttaatttcagataaacaatgaataattgcataggacatacctaaaaataaaaaagtactcactatcagctgagtgtggtggctcatgcctgtaatcccagcactttggaaggccgaggtgggtggatcacttgaggtcaggagttcgaaaccagcctggccaacatggtgaaatcctgtctctactaaaaatacaaaaattagccaggttgtggtggcaagtgcctataatcccagctacttgggaggctgaggtgagagaattgcttgagcctgggaggcagaggttgcagtgaaccgagattgcaccactgtactccagcctaggtgacaaagcgagactctgtctcaaaaaaatatataaatagatagatagatagataaataaaatttattatctgaaattcagattaactgggcatcccgtattctacttggcaaccctatttgtaggtcaaggtaaggatttgattttgctcatatcctgagaataaggtattaaagggttttaagcagggagtggaataatcggatttgaattttaatagatcatactggctacagattggaagaaggcaacaaagaagcagggagaccaggaagcaattattgcggtccaagaaagagatgggactgggaatgggggcggggccagtggagaaggagagaggtagacaggttgagctatatttagaagataaaatccacagtacttggcaacctactccagtcccactgctttatattcctatcatgtgccaatgatacctcaatctatatcacccgcctgggctctgccaggaactccagcatcatatgggatacagcttatttggcatctcacttaacacagccaaaatagaaatttgggtatggcttctccaaacaacccttgcaaatgtgctactcccctgcctagacttccccatttcagtagggaacaccccaatccacctggtcactcaaggtaaatgtgcagaacatgcctttgattcctccctccctctcaccatcacactcaacccatctgccaccctgtcaactctccctccaaatcacatcctgaattgatccacttttccctatctccgctatcaccacctaccacaagccactatctcttgtatcctcaaaattggtatttctgcttctgctttttatcccctatgagctattctctgcttgagagccagcgtgatcctttcaaaacagaaatcagaccttagcttaaaactttttttttttttttttttttttttttttaggccaggcgcagtggctcacgcctgtaatcccattactttgggaggctgaggcagggagatcacgaggtcaggagatcaagaccatcctggccaacatggtcttgatctcctgacctcgtgctcatggtctactaaaaatgcaaaaattagctgggtgtggtggcagatgcctgtaatcccagctccttgggaggctgaggcaggagactcgcttgaacctgggaggcggaggttgcagtgagccgagatcgcgccactgcgctccagcctgggtgacggagcaaggctccatctcaaaaaaaccaaacaaacaaacataaaataacaattgttagtgaggatatggagaaactggaacccttgtgtacttctgacggaaatgtaaaattgtgcagctgctgtgcaaaacagcatggtgtttcctcaaaaaattaaaaacagaatcactgtgtgatccagctattctacttctggttatatagcaaaaaaaaacaaagcacgatctcaaggggatatttgtatacccatgttcatagcagcgttattcacaatagccaagaggaagcaatccaactgtccatgaatggaagaatggaggagcaaaatgtggtatatccattcaacggaatattagtcagtctttaaaaggaaggaaattctgacacatgctacaacaggatgaaccttgaagatgttgtgctaagtgaaataagccagacataaaaggacaaatatttaatgattccatttatctgagctatggtatttaaattcagagagacagaaagtagaatagtgattaccaggggctgcagaagggggaatggagagttattgtttaatgggttcagtctgggaagatgaaaatgttccagagatgaatggtgtggttgcaacacagtgtgaatgtacttcatgccatagaactgcacacttaaaaatggttaaaaggccgggtctggtgactcacgcctgtaatcccagcacttggagagacccaggtgggtggatcacttgaggtcaggggttcgagaccatcctggccaatatggcaaaaccctgtctctagtaaaaatacaaaaattagctggacgtggtggcgggcacctgtaatcccagctactcgggaggctgaggcacaagaattgcttgaacctgggaggaggaggttgcagtgagccgagatagtgccattgcactgcagcctgggtggcagagtgagactcagtctcaaaaaaaaaaagaaggttaagagcctggtgccgtggctcacgcttgtaatcccagctactgggaaggccaaggcaggaggatcacttgagcccaggagttcaagaccagcctggacaacgtggcaagaccctgtctctttaaaaaaaaaaaaaacaaaaaaacaaacaaacaaaaaaaacaggccaggtgcggcggctcatgcctgtaatcccaggtgtggaagtctttgggaggccgaggcgggcggatcacgaggtcaggagatcgagactatcctggccaacatggtgaaacccgtgtctttactaaaaatacaaaaaacaaaacaaaacaaaagttgctaaaaaggttaaaatggcaattttatgttacgtacattttagcacaataaaaaaatttaaaatatactcattgggttttggcaccaccgggagggcgctaacattaggttgaaatgtatgccccaaaggatgacaaagatcttagattcttcctctctctctctgatttttgctgggcagaaaacttcttcaggggcatatgcctaaattctggtaatattgttcaattatttgctatggtctgaacatttaccgcaaaggttttttgagtttctgaaaccgaaaaacatatcttagagtatctcagatcttatttaagaatcaccacaactttcaaataatatagagatttggtggcatacaaatatctaccattcactttctttgctgaatggtccttctacgaatattcctttgatgaagcacttactgtaccccattcatgcaatgtacacgtcaccagctgtcaaccttccatgacaaatttctaatgggtaacatcctcccttttgaatgtgagcaggcttcccttcctacccattatatatttagactcattcattgtatatttatcatctgattctattctaggaattgaatgtgagaggcaatatcttcccccagtcttcacagctaggcagccaagcagcataaacatgacaaacaatccagagagaacatccacaacacacagtaaaatgcacagggtcacagctgcctttgaagaccagccttaaatgtctctaaccagtgagggatagccagaccctcttcttgctcattgaccttgatggatgcacattggaagtggaacgcctcctgacccgttcctagcttaggcttggttgcagaagactcctagttcccttattatagctggtgtcctttccagaaaggattgtaatctcctttaatagtttaccaaacttagactcaaatttacagacgaatatgcaagcacagttccagctttctcaaccaggaagtcttactttcccttaatggatcaagtccacgttctatttattatcctagcttgcaacgttaagtgtgacttattcaacaaacgtgtattaagctctttgtatggatcacagacaattgctggtgccatgaatacgaaaatgtgaagtggccgggcgcggtggctcaggcctgtaatcccagcactttgggaggctgaggcgggtggatcacctgaggtcaggagttcgagaccaacctggccaacatggtgaaaccccgtctctactaaaaatacaaaaattagccaggtgtggggtgggtgcctctaatcccagctactcgggaggctgagacaggagaatcgcttgaacccggggggcagaggttgcaggttgcagagagccgagattgtgccattgcactccagccttcgtgacaagagtgaacctctgtctcaaaaaagaaaaaaaaaggctgggcgcagtggctcacgcctgtaatcccagcactttgggaggccgaggcgggcgaatcacgaggtcaggggatcgagaccatcctggctaacaaggtgaaaccctgtctctactaaaaatacaaacaagtcagccgggcatggtggcgggcgcctgtagtcccagctcaggaggctgaggcaggggaatggcgtgaacccggggcgcagagcttgcagtgagccgagattgcgccactgcactccagcctgggctacagtgcaagactccgcctcaaaaaagaaaaaagaaagaaagaaagaaaagccttgctactgatggtgccctcatcacctctcacctggtaactacaataactgcgatagacttctagggaatctccctgttggtgccccaggcgcacttgctactgagaatgctcttagttaactgcatgatcgctccctcccctagttaactgcatgatcgctccctcccctccttcatgccatcctcaaaagatacccttgggccaggcactgtggctctgtaatcccagcactctaggaggccaaggggggagggtcatttcagcccaggaattcaaggtcagcttgggcaatacggtgaaaccccatctttacaaaaaatacaaaaattagccgggcatggtggtgcatgtctgtagtcccaggtactcgggaggctgaggtgggaggatagcttaaatccgggaagcagagattgcagtgagttgagactgcgtcactccagcctgggcgacagagcaagaccctgtctcaaaaaaaaaaaaaaaaaaaaaaagacatcctctcaaggaggcctgtggtcatcctagtgaaaatttcacatacacagaccactccttcctcccccacacacccacgctttatctctcccttctgagtttaatgtttttcttcttaccacctatcacaaagtaagttatgaagcataataataaactatatcctcttgatctcacaacccagcctaaaaattaaaagattatcagagttcaagatcaccttgggcaacaaagcaagactccatgtctgcaaaaaatacaaaaattagccgggcgtggtgatggatgcctgtagtcccagttattcgggaggctgaagcaggaggattgctttatttagcccaagagttagaggctgcagtgagccatgataatgccactacttttgaacaacaaaagacctattagcattataaaaatagactgcatttgattccttcacagtagctggatattctccttttgcccatgtcgtcatgttggggcaatgagaaacaacacacatggcgatctggtggatgcttaaatctaaactgaggcactttgtcacactgggtacatttgtttagtaattgcctattaaatggtttctccctaagaacatcacaatttatctttacttatttatttaacattattgattgaatctgccatgcttatctgagaaacatacatttctcccggaaataaaaaccttgccaaaaatcacacaggggaccttcaacttcaccttcatcaaactagtctgaatttcctgtaagctgaggagagattttccccactggggctcagagaaggggagtcagagaactcagaaggcctgaaagactgaaaagactggagatctctagagggttccaagaaacttggggggaattaagcatttcacgtaggaacagcacgttattgggagtttacctacagagataaatattttttctttggcagatcgttccacaaggccatggatggaattcctagggagttcccttgcaattaaaaaaaaaaaaatctagcttatttatattcgaccactccctagacccatctacagtctctcaagtccccacctagaacagcacgcagccgattcaggacccagtaagcagcacttccgcgcctaccctatcccttcctggagcacatccgggactcggcgaggcgtggtctcgggaggcggagtctgacgcaagccggcccagcccacctggctaaattcacagtcgcgctcgctccttccgcccgccagaggtcgcaggctgcgagagcaggttcctggtttggcaagcactcgccccctcaggcccgttcattctcgcgagagaaagcgcgaggcctgccgggagtgagcgcggccgtacttaggtttgctcaaaatggcagcgctggaggaagaattcacgttgtcttcggtagtcctgagcgccgggcctgaaggactcctaggcgtggagcagagcgacaaaacagaccagtttctagtgacagacagcggcaggacagtcatcctctataaggtgaaggcaataggtttgggagcgccccgactgccttctcgcccctttctgagcgcggagctcgagctcaagtttctcacagcttcagaaagagatcgtggagaaggcttagcagagagccggctgggcctgttggggacgctgagtgaggtctggaatctggcttgcttgccttcctgtaaaggcatatttccgacttgcaggggcagagcgtctgagtgcacgtgggttagactcggaaaagaaagaaaacctgtgcttttgcttcggaactcgcggaattggccttgctaagattccctcctagggtctttattatcttagccgcccgcgggaggatggaacggagattggttgggcgggagaggatgacactgacagagtgggaatagtggtttagccgtgtctacacttcacacccctctctttgtaggggcggggacaattttagagagtgagggactttcttgatagctcgctaagaatcttgcctccaagtgagttgtctgttggcatctctgattcacgctgggaatcctggagttgagtcctgggaaaatctgcaagccctgcccccatttcagcctaaagcctgatagagaacactttctaaccttgcttttggtggtcgcatagaaagcagttacttttctctgggctgctgaacatagttttccatgttttaaagaagttaggtatctgctttgacgttttgagaacaggttgctaacagctccctgtgccgttttgactctgctaactctattgggtttcacttgggatgtcaagtagatttgcagttttgcagctcctgcataggaatacaatggcagattggaattggatagacatgatcccagatgtccctacttaatttcccatgccgctgttcagaggcataacttcccatgcagaggcataatataatcaatttttaaatgtactattgtttttttaacaaagggttgcttatttacttatttaggaacttagttatattttcattttaactacccttttagaggtttggccggacgcggtggttcacgcctgtaatcccagaacttcgggaggcccaggtgggtggatcacttgaggtcaggagttcgagaccagcctggccaacatggtgaaatcctgtctctgctaaaaatacaaaaattagccgaacgtggtgaggtgcgcttgtaattccagaggtttgggaggccgaggtgggtggagcgcagtggcacgatctcggcccactgcaacctccacctcccgagttaaagcgattctgctgcctcagcctcctgagtaattggggttacaggcgcacgccaccacgcccggctaatttttgtgtttttagtagagacagggtttcaccatgttggtcaagctggtctcgaactcctgacctcgtgatttgcccaccttgacctctcaaaatgctgggattacaggcgtgagccactgccctcggccagtaaattttttaaatgctgtcattttaatggtttcttttattgattataaacttaattgcttttaatgtttgaagttgacttcttgaatattgtatttatcttaatttcattaggtttctgatcagaaacccttggggagctggtcagtgaaacaaggtcaaattataacatgtccagctgtgtgcaactttcaaactggagagtatgttgttgtacacgataataaggtgagttttaaaacttttgtataatatatacaatataaatgttgattattaactatttgtatttattatatgtaaatggagaataggatagtttttaactagtatgttttgatttaaggttttaagaatatggaataatgaagatgtaaacctggataaagtatttaaagctacagtaagtctttgaattttccaacatatttgtttagcttattggtgaattagaatcattcataataaagtatgtgttatttattttaatacctctgggaaaataagcataaggtcctaatcaggttttcattctaattatcttacaatgtatcttggtaacatgtctccatgagttaaggagatgaggatttatataattgatgaatgagaaatttatacttatttccatgagtttggatgtttggagtgtgtcttttgtgagagcaaaatgaacttctgtgccctttcttagaataggtagaatagaccctgcaagtttcgtgtattggtgtattgtacttttttttttttttttttgagacggagtttcgctcttgtcccccaggctggagtggaatggctcgatctcgactcactgcaacctccgcctcctgggttcaagcgattctcctgcctcagcctcccgagtagctgggattacaggcatgcaccaccatgtccagctaattttgtatttttaatagagacagggtttcaccatgttggccaggctggtcttgaactcctgacctcagatgatccacccacctcagcctcccaaagtgctgggattacaggcatgagccactgcgcctggcccatgtattgtacattttgaagagtggcacataatacagtaaaaaataaaataaaaacatgactagctgtgcatgttctactgatgacctagagtgtgttcattttttcttacttataaaatgaggatcttaaactaggttaatcttgaaagttctttccagttctaaatgtctaaatataattggcacattttagaagtggctcacaatagggttaattcagatataatgcagttgttgcctggatccttgaaacttctagctagctagctgtgctgttccctggctccattcttttcatttaccttgaaattcataacacaatcctgaattttaaacagtgggggtttttttgttgttttcctcacacacggtgttaacttctttttctggaattgcaggctgtagttacaattgtggcattagtttttatctaacaccagaattgcatgtacctctgcatgaatggcttatctgtatctttcccagttttaagaaacccaggttttagcctaacctctagtagtcacaacgggtaaaccaaaaatgaatttacagattaaagcagggactaggtagagaggataagagaaaaagttaagacttctaaatgtgttttgtgttgtaggttagattttggaaccatacataattataaagcaaaattaattcaaaatgaaaataaagcagtcacttaaaaagaagccttctctaaatatccttatattaggtataaattgttttagaataaaaattaaaattttttatgttcttccagttgtcagcagaagtatataggatactttcagtgcaagggacagaacccttggtgctcttcaaggaaggtgctgttcgtggtttagaggccttgcttgcagacccccagcagaaaattgaaactgttatctctgatgaagaagtgattaagtaagttccagtacttgtaagtaaatttatcaaaataaaaatgcactgaacatttttttgccttgttcaaaagtattttggttataaacataatgaaagtaacctaattaaaaatcacttacaaaacactgactaaaacaacatcctaaaaagcctctgggcatgaagattgaagaaaccatagagtcatatgaagtcttgacagaactggatacttagttatttgaggatgaaatgtgttatcccaaaagaccaaaatctttttgttcctctcatattgccctgactaccaagctcccatccttgtcccctggctaaaagtgcatcgtgttagtgaaatcatgatgcattaagacctctgctttcccagattctgaaataaaactggaaaaatgactcatcaagggatagaaggacacttcatgattccacatctttctgatactctttatttcatcacatttcctgttcattttacttgttttctccaggtccacctggtagaaactaattttctaaaagtcagagtgaagactggtacttacaacgtggccaataaccagttatatattagactgacctgatgaatccctctaaggtgtgagcaactgttgtgagggaaatccttggaggatttgagttctagttgctgctttgccacaaactgtgcagccagtaacttctctatgcctcagcttcctctatattgagatcttaatgttttcctcagaacacgagtcccaaaagtaactctgaagaaaatgaggtaggggagtcaatttaagtttgggaagcactgcatctcccctcttagaactttaaaattcacattatcatctggggagttcaataacctgcatttaatccagagctgcatttgacaaatgcgtattgcttgtggtatatgtttcaaaacgcccaattaagtgttctctgatgtctttctggttctaaaaaatatttaatgaaaactttgattaaattttgattgatatgtgtctcccagctggtgatttttgcatcctataatttttcttttttctttttttgtagatggacaaagtttttcgtagtattcagacatcctgttttaatttttattactgaaaaagtaagtgatatcttcaattcctggcccattttgtgaaatttctttaaaaaaaaaaaatttatttagagacagggtgttgccctgtcacccaggcttgagagcagtggtgccacgatggttcactgcagcctcaacctcctggctcaagcagtcctcccacttcagcctgccgagttgcctcgtagctgggactacaggcatgcactaccatcctggcttatgttttattttttgtagagacagggtctcactgtattgctcaggctggtctcgaactccttgggctgaagggatcctcctgccttggcctttcaaagtcctggaattacaggtgtgagccactgtgcccagctgtgaaatttcaaaacttttttttttttttttttttttttgagatagagtttcgttcttgttgcccagcctggagagcaatggtgcgatctcagcccaccgcagcctcctcctcccgggttcaagtgattctcctgcctcagcctcccgagtagctgggattacaggcatgcaccaccacgcccagctaattttgtatttttagtagagacggggtttctccatgttggtcaggctggtcttgaactcccaacctcaggtgatccacccacctcagcctcccaaagtgctgggattacaggcgtgagccactgcgcctggcgcaaaaccattattttttaaactaaaatgtgacttcgttattctctcagaagatctctaatttttttttttttttttttttttttttttttttttttgagacgattctccctctgtcacccaggttggagtacagtggcacaatctcggctcactgcaacctctgcctcctgggttcaagcgattctcctgtctcagcctcccaagtagctgggactacaggcgcccaccactactcctggctaatttttgtatttttagtagagacagggttttgccatattggtcaggctggtctcgaactcctgaccttgtgatccaccgactgcggcctcccaaagtgctggtattacaggtgtgaaccaccaagcccagcctctaacttttttatgaccttttaaatttaaggctgggtgtggtgacctcatctctattaaaaaaaaaaaaatagtgtagcatggtaacacacacctgtattcccagatatttgggaggccgaggtgggaggattgcttgagcctgggaggtggaggttgcaatgagctgagatcacaccacggtagcccagcctgggccacagagcaagaccctgtctcaaaacaaacaaatttgatagcataagatgtttttaagtactcattgatgtaagtagaatggggtgacaacttctggttttaacatatgttaaaatacttggttgaaatgggaatatttataaaataaccttttttttttgcagcatggaaattactttgcttacgtgcaaatgtttaactcacgtatcttaaccaaatatacactcttacttggacaagacgaaaactctgttataaagagttttactgcatctgtagatcggaaattcatctctttgatgtcattaagtaagttttctttctttaaactttcagagattataaatagaggattgttataggatagtgtatgtttttgaatcgtagactttgtgaagcattcagttacagccatttctgtgcttctttacagcgttcatgccttcactttttttttttttttttttgagacagagtctcgctctgtcgcccaggctggaatgcagtggcacaacctctgctcactgcaacctctgcctcccagagtcaaacaattctcctgcctcagcctcctgagtagctgggattacaggcgcccacccccacatctggctcatttttgtatttttagtagagacggtttcgccatgttggtcaggctggtctccaactcctgacctcaggtaatccacccgccttggcctcccaaagcgctgggattacaggtgtgagtcacctcgtgcggcccatgcctttgctttttgtactttgcatgtctggccatgcattagatcagtgatcctgtgttttgagggcctattgaagtactttagatacagcatccttttctaacattgcttctttatattttatgtcttaaaatttaccataagctggccgggcattgttcacgcctgtaatcgcagcactttgggaggctgaggtgggcagatcacaaggtcaggagatcgagaccatcctggctaacatggtgaaaccccgtctctactaaaaatacaaaaaattagccaggcatggtggcgggtgcctgtaatcccagctactctggaggctgaggcaggagaatggtgtgaacccaggaggcggagcttgcagtgagctgagatcgtgccagtacactgcagcctgggggacagagcgagactcgagactcgtctcaacaaaacaaaacaaaaaaatttaccataagcaataagtaacaatgttaataccagtgaaaaagagaaatcactttttagctgataaggcccaggttctttgagtgtaattagtgaaacataaactgtctatgcttggcattgaatggcccctctgctccttttttccaaccattagatttagtatgcccttccttgaatagcaactgagacagatgggcaaaaggagactaacagcagctttggcccatgccagttgctttttattatagattgtaatacctttatgaaatggtctaaagtataaccccagtcttaggcctctagggcggggaagaaaaaaaaaagtctttgtggtaccctctcccctccacccttcatggctgcttttgaagttgttctgagaaggtgaaggagaagtaaacaagagcaatacataggaaacatttccatattatcacaattaaaaatctttgtgaagtttttcagtgtgcaaatgtttgcggtggctattttttaaaaggctcctatcattttcatatcttgggggctattggaatgtacttaatgtttagcttaatgaactttgaagtgaggaagtgtgcaccaaagggttatataaatctttacgtaacaattgctagaaccacatgaaactgccgaaattcagttggcccacaagaaagagcaatttcataaggttttcagggtgatgaggtaggaagaattataataaactaagcacactggctcacacctgtaatcccggtactttgggagaccaaggcaggaggatcatttgagcccaggagttggagaccagcctgggcaacatagcgagaccctatgtctaaaagaaaattttttttaattagctgggtgaggtttgtgcacctgtagtccccgctatttgggaggctgaggtgaaagatagatcacttgagcccagtaggttgaggctacagtgagctgtgatcacaccactgcactgtagtcttgggccacagagtgagaccctgtctcaaaaaaacaaacaagaaagaaaggtaacgtatagaccagatgctaattactttctaatgagggatatatccttttagggactagatgatctatattcttgggagtccccctcaatattttaagttattgcaggtatttacagtttgtatttcttgactattacatttcttactgagatttttattaatagtacttctttccccagtttaaatttgtggtactctttaagagaaagcacagtgatgggattgtttatttttctggttggctgttttatcaaattggtaaaatcttataaacaacctagtacatttaactgtaatagatatagaagtatccttcaataaccaacaacaaatgcttgtttccaacaggctctgatggttgtatatatgaaaccttgataccaatacgtccagctgacccagaaaaaaatcagagcttagttaaatcactgctgctcaaggctgttgtatctggtaacgctcgaaatggagttgcactcactgccctggatcaggatcacgtcgcagtcctaggaagtccactagcagcttctaagggtaactgacatccaattcattaagaaggcctttgtatgtttccttcacggtgtaccttttagtcttccttttctttttcatttcgttattacccagactaattcattctctttatcagcatactcaattttttttgtgccttcctaattcttcttgaattggtttttatttttattttgcattgatctttcaaaaacacttcttgctatcaccaccatgctcataactatgtcataaagaaataaaaatggcgaatatactagtcaccatcatactagcctgcaggtatttgaaacattagtaagcctacatttgaggattggattcttggcaacatttcacatcatggaaatccactggacatgaacaccttgaaatgtgggaactaatagtgtacctttggactccgtgacttctgaacaggattctcatcgccaccttgcctccttacccaccaactccccgccagacttcctagtcagtcatgaagaacacgattgctccttgccagtgcaggatagcagaccccagccttcactagaaaactcagactctgtcgtttagcataagtcccttcacagcctagacctgtccaccttttccaaccttttctcccaaattctgagcaagaaccctctgctttattcaggcagtgctctctattgaccacacatttgatatgcccatcctcacctgtgtactttgttctgtgtttctcctgcttattattaacataggagcaaggctcaatgcctataatcccagcactttgggaggcctaggcaggcagatcacctgaggggagctcgagccagcctgaccaacatggagaaaccccgtctctattaaaaatacaaaattagctgggtgtggtggcgcatgcctgtaatcccagctactcagggggctgaggcaggaggatcgcttgaacctgggaggtggaggtcgcagtgagccaagatcacaccattgcactccagcctgggcaacaagagcgaaactccgtctcaaaaaaaaaaaagataggagctcctgccaggcacagtggctcacgcctgtaatcccagcacctggggaggctgagacaggcagattgcttgaggccaggagttcgagaccagcttggccaacatggtgaaactccatgtctctaccaaaaatacaaaaaatcacctgggctttttggcgcacaaacccagaaggtggaggttgcagtgagccgagattgcactatgcactcaacctggtcaacagagtgagactttgtctcaaaaaaaaaaaaaaaaaaaaaaaaagagctcctggttatagtataactataccatgtgcgagccgggcacagtagctcatgcctgtaatcccagcactttgggaggccaagacgggctgatcacaaggtcagcagatcaagaccatcctggctaacatggtgaaaccccgtctccactaaaaatacaaaaaattagccgggtgtggtggtgggcacctgcagtcccagctactcgggaggctgaggcaggagaatggcgtgagcctgggaggcagagcttgcagtgagctgagatcacaccactgcactccagcctgggggacagagcaagactccgtctcagaaaataaataaataaataaataaaataactaccatgtgcctggcactttactaagattatctcattatttgtatcatttagtcctctaccatttaggaggaaataaagttgttactatccccctttacaaaacaggaaactgaggtatgaggtaactaagtagtggaactaggattcaacccgaacaggtgaactctgttaagccatgtaccctgccgctcttaagtcctggctcttgaccacttcactaagctgtgcttctcctctctcttctcccatcttcctctctttcttatttctgctctacctccctgccaaaaaaacccggtggctactatagagtttcctgtgtctcttcctatggtttttttttggtccatatacaagcaaatactactacttaaggggttttttcccctcctcgtttaacacaaatggtagcacaccatgcatactgttgtgtaccttgtttattcacctacccaagatctctcagagatcattccatataatattatttgttaatcttccttgctttttgaatagctgtgtaatatttcaccgaagggtggccccacagtgtgcttcatcattctcccattgccagacatgaaccatctattctgtttttttaaattaagatgaaattcatataacataaaattaatcgttttattttttaaattttgtaatgctctttttaattttcatttcttttttcattgtttactttcatttatctttaatttttggtaggcccttgtagaagaaattaaagtgaaggagtcactggtgttcgttgtgcatctacttctgtctagttttttttgttgttgttgtttttttttttgagacagagttttagtcttgttgcccagggtggagtgcagtggcgggatctcggctcactgcaacctctgcctcccaggttcaagcgattctcctgcctcaggctcccaagtaactgggattacaggcatgtgccaccacacttggctaatttttttcctttttctttttgtattttttgtatttttagtagagacggggtttcaccatgttggtcaggctagtcttgaactcgtgacctcaagtgatccacccaccttggcctcccaaagtgctgggattacaggcgtgagccactgcacctggccaacgtcttgttttaaaacattttcattatgtcaaaaggaacctgtggacccattaggcagttgctcctcattctcctctgccccctacccttggcaaccaccaatttgcattcttctatggatttacctttttgggatactttgtgtaaatgaaatcatacaatacttttttttttttgaggcagagtcttgctctgtctcccaggctggagtgcagttgcgcaatctcggctcactgcaagctccgccccccgggttcatgccattcccctgactcagcctcccgagtagctgggaatacaggcgcccaccaccacgcctggctgatttttttgtatttttagtagagacggggtttcaccttgttagccaggatggtctcgatcccctgacctcatgatccgcccacctcggcctcccaaagtgccgggattacaggcgtgagccaccgcgcccggcccatcatacaatactttttgtgtctggcttctttgacttagacttagcctaatttttgtttttatatttagtttttagtagctctgaggtcttgctacgagctcctcctgcctcagcctcccatagtgttgggattacagacaagagccaccacgcctggctagccaaatgtttttgaggttcatctacctcgttgcatgtatcagtgtttcattccttttcatggtagagtaatattccattgtatatatataacagtttgttatctgttcatccattcatggatattttagctatttccaccttttggttattgtgaatatcactatgaacattcgtgtgcatgtatttgtgtaccagttttttttgttgttttttgtttgtttgtttgtttttttgagacaagagtctcgctctgtcgcccagaggctagagtgcagtggtgcaatctgggctcactgcaagctccgcctctcgggttcacaccattcttctgtctcagctttccaagtagctgggactacaggtgggtgccaccacacccggctaattttttgtatttttagtagagatggggtttcaccgtcttagccaggatggtctcaatctcctgacctcatgatccgcccgcctcagcctcccgaagtgctgggattacaggcgtgagccactgcgcccagctgtgtaccagtttttaattctttgggatatacacctagcaggggaattactgggtcatgcgttaattccatatttagtttttcatttttttaatttttatgggtacataacaggtgtatgtatttaaggggcacatgagatattttgatacaggcatgcaatgcataataatcacgtcagggtgaatggggtacccatcacctcaagcatttgtcattcctttgcattgcaaacattttagttatactcttttcgttgttgattgtgtttaactttttgaagaactgccgaactccacagtggccgaaccattttacattcccaccggcattgtacagtggttccagtttccctgcattcttgctcacacgtggctattttccataatttggattctggccattctagtgggtgtgaagtagtacttcatttcggttttgatttgcatttccctaatgactaagtgtgttgaacattttttcatatgctcattgtctatttatatgtcttctttggagaattgtctatgcaagtcctttgcctatttttaaataaggttgtcttttttgttgaattgtaagcattctttatatattctagatgctacacccttatcagacatatgatttccaaatattttctcccattctataggttgtcttcacttggataatgtcccttcgtgcacaaaagttttttttttttttttttttttttttttttgagacggagtctcgttctgtcgcccaggcgggactgctgtggcgcgatctccgctcactgcaagctccgccttccgggttcacgccattctcctgcctcagcctcccgagtagctgggactacaggcgcccgccgctgcgcccggctaattttttgtatttttagtagagacggggtttcaccgtggtctcgatctcctgacctcgtgatccgcccgcctcggcctcccaaagtcgtgcacaaaagttttaattttcatgaagtccaatttttatttttctttcgttgcttgtgcttttggttccacatccaagaacccatggccaaatccaaggtcataaagacttatccccacgttttcttcaaagaatgttatggttttagctcttacatttaggttgttgatttattttgagttatttttgtgtatggtgtaaaataagggattaactttgttcctttgcctgtggctctccagttgtcccagcaccacagtggtcctggcacctttgttgaaaaatcagttggccctagatgactctcaatctattacactgggccagtaccacactgttttgattactgtaactttataatcagtttggaaatcaggaagtatgagctctccaactttgttcttctttttcaagtttgtttttgctgtttaggccccttacaattattccatgtgattttgaagactggcttttccatttctgcaaaaaagaccattggaattttgattgagattgaactgagcctgtaggttgctttgtgtggtattgccatcttaatattaagtcttccaattgctgaacacaggatatctctatttatttatgtcttccttaattccattcagcaatgttttataacttttagtgtacaatgctttcacttggttaaatttattcctagggaccgggcgcagtaatcacacctataatcccagcactttgggaggccaaggtggccggatcacccaaggtcaggagtttgagaccagcctgaccaacatggagaaaccctgtctctactgaaagaaaatacagaattagccgggtgtggtggcacatgcctataatcccagctacttgggggagcaggggtgaggcaggagaatcacttgaacccgagaggtggaggttgcggtgagccaagatcacaccactgcactccagcctgggcaataagagcaagactccgtctcaaaaaaaaaaaaaaaaaattattcctaggtattttattctgttggatgctaatatacatggaattatttttctctttttttaaaaaaatgttttatttttggagatggagtcttactctgttgcagggctggagtgcagtggcatgatcttggcttactgcaacctctgcctcccgcgttcaagcagttctcctgcctcaacctcctgagcagctgggactacaggtgcatgccatcatgcctggctaattttttatattttagtaaagacagggtttcactgtgttgccccggctggtctccaactcctgagctcaggcaatatgtctgtctcggcctcccaaagtgctaggattacaggcatgagccaccatgccctgccggaattttttttcttaatttgctttttgtttttagtatataggagcatctgatttttgtatgttgatcttgtaccctgcaaccttgctgaatttgtttattaatgctattaatgctaatcttttcctgtggattcttcgagatctctatacaggatcatgtcatctgtgagtagagttagttttacctccatttaaatttggatttttggctgggcgtggtggctcatacctgtaatctcagcactttgggaggccgaggtgagtggatcacctgaggtcaggagttcgagaccagcctggccatcatggtgaaacccctgtctctactaaaattacaaaaattagctgggcgtggtggcatgcacctgtaatcccagctactcgggaggctgagacaggagaatcacttgaacccaggaggcagaggttgcagtgagccaagatcgtgccactgcactccagcctgggcgacagagtaagactctgtctcaaaacaaacaaacaaaaattggatttttgtttttcttcttcttgcctggctagaacttgaatagcagtggtgaaaataagcctccatgtcttgtttctcattttagggggacagttttcagtctttaacctctcagtgtgatgatagttgcgtagaatagcagtggtgaagaaggcagggcaagcacctttgtctttttccttatcttagggggaaagcttttagtctttcactgttgagtgatggtaattgtgggtttttcatagatgccctttatcatgttaaggaagctccttcctttttcctagctctctgagttttttttgttgttgttttttaagtcatgaaagactgttggagtttgcacaatgctttgtgtcaaccgaggtgatcatatggttattccctctgttctgttgatgtatgtgctgcactgattggttttcttctgttaactaccctttcatccctggagtcaatccttcttggtcatggatcttaatatttcccgttggatttggtttgttggtattttgattaggatttttttttgcatctatactcatggggatattgctctgtagtttttttgtgtggtgtctttgtccggctttggtatcagagcaaccaaaagcccaaatgagtttaggaagtatttcctgctcttttatattttgaaagagtttgggaagatttgtgttaaattgtaaatttgtagaatttaccagtgaagccatctggtcttgggcttttctttgttgggtgtttttaattgttattcctggttcataaagccctcccttcctcagggctcacctttccaggcttcttcttaccatgagctctcatttcttccagttcctgtggcaatcactgtcttcataattcatttctatactaaagcaaagcatatatatttaactgtaactccccccttccccaaaatatcatatatttatacttgggacttttttctgaatttatgtcttattttatagaatgcctctctgtatggaacataaaatttcaaacactacagacttcaaaagagttaccacaagggaccagtggtcaagtaagttttttcacttgagtactttctctgatttagttattttgttgtgttttgttttgctttgttttgagatggggcctcactctgttgcccaggctggtcttttactcttgggctcaagtgatcctcctgcttcagaaatttagttatttttctgcctaataaatatgctgtaagggaagagatctctttgaacctaaatattttggcagcttttcaaaccaggtgtggtggtatgtgtctgtagtccctgctactgaggaggttgaggcaggaatatcttttgagcccaggagttcaaggcttcagtgctgtatgattgtgcctgtgaagagctgctgcagtccagcctggacaacatagtgtgatctcatctctgtaaataaataagtaaatagcttggcagttattgatcaaatttaagaattattttttacctgagggattatgtttagttcagttattgttgaaatcacttccaaaattctaaatttttgccagaacaattagctatttaataaaacagcttttgtttttagctgctctttggttttgtctttttacttatgtattttgaactataccctcaagctgttacttttcctaataaattagtcttttagattatgtgttaaatgttaaatgttaccatgaaattacataaaaatacttaaaagaattaaaattgaagctgaacagactgtgcacttcctgaggcagggttccttgtgagtttttttctccagtgtattttcagtgcttagcaaggtgcacagtaagttttagttacttagtgaatgaatattcatatacaaataaatcaaggcaataggatgttttggtaattttaatttgaggataaagagacaaggtttctcagcatacaatttaattatactttatatgtaaaaaagtaattttaactattcacaattttttattgtgaataaactcacacttttttattacaacttattattttatttgttttatcattttattatttattattacaaacttttttttatttccttgttccctcaggcttttttttccacatacctgtcttatttttacaatcataaaatataaagtgttaaattccggtttgtaaatttagtgcattagaagtttgcccatgctatagtagccttggtaattattatgttaatagatgtataatagtgaccacattaattttaaacaattgagttttttaaaatgtatatgttgattaaatttttctgagttgaaaatattctttaaattatgcttcattcagacttgggcaaaaataagagcctatttaataagctctgcatataaaattcttcttgaaagttgcttactttgcctcgtttttaatactgagcacttatacagtgagtgataaggctttattgagtcataccttagaagagaaaaaaatttgcttatgtttttgataactttttttgtagctctggtattatggagaacatttgtttatgctacatggaaaatctctaactgtgattccatacaagtgtgaagtgtcatcattagcaggtgctcttggaaaactcaagcatagtcaagatccaggtagaaacttacttctgtttgttttattaatacaaaccgttttattaacttgtagtttcgtacagattcccacagccttctatttgtaaagctttttcttaattttgaaatttaccgctgtttattgaaacttgtgaacaggccaggcacggtgtctcacccctgtaatcccagcacttaaggaggcagaggcgggaggatagcttgagcccgggagttcaagaccagcctgggcaacatagtaagaccctgtactccacagaaaatggaaaacaaaaaaaaaaaagtttgaaacttgtgaacagtccaaattgcaggttctgtggcaagctgaagagctacactgtgttttgaatgccagtgttctgattttaggggcaatgggagaacccccaaacaaaatcagtaatacctctgccctcccttgtttaccgatggcctcatctgttagcttaacgttgttggacatacagccttttcactatattatgattttcttatctgaggttatcagaattacatggacttcaaagcctctcttaaattgtatgagtggttttttttaaattgttctttgattgtttagttgggcaaaaagtaagtcaaaacattccagaaattgtgcattttgcattttcttaggaactcatgtcgtgtcccattttgtaaactgggagacacctcaaggatgtggacttgggttccagaactcagagcagtcaagaagaattgtaagtttcgtagttgaaattgaaacattagtgcaaatgttgaaaaacagaaaaagactgaattattttaatgaatcatatccttacaactcttagagctttgactataatgacaggacagtttgcggcttgaacccagtaacctcacattctttatccagaaatgccccatgttgtctattagttatatttacttttaaaagtttttgatgagagcaaaagtgtgctaatctctttggagtgtttcatatccctctaaatgtgtattggatctcttatattgttttgtgatcctaatcaatttacttaattccagttaaggagacgaaaaattgaagtgagtttacagccagaggttccaccatccaaacaacttttgtcaaccataatggtaaataaataatattgaaatatgaaaaatcaaactcaagtgttccaaagaaatcgcatctactcttcgttctgtcttatttttatgatcatctttatacctatagctaacatcttgtagtatcttaagggtgtcagagttgatccgatattttggcttctttgatgctcgctgtcacctcatgagattgatatggtgttggtcttatctctttctcatttaactttgcagtgtcagcttcagctttgcaggaatgcatgataactgttagtcatttgagaaaatgttgtgctaggaaacgttaagttcagagtgacattcgttaatgtgccaaactgaattctttaattctgcgctttcagaaagattcagaaaaacacattgaagtagaagtacggaaatttttggctctgaagcagacacctgactttcatactgtcattggggacacagtaacaggacttctggaaaggtgtaaagcagaaccatcattttatccccggaactgtctgatgcagcttatccaaacgcatgtgctttcttacaggtagctgtttgtgtgtaccacactgtacgtgcataattcttctgaccttgttttttatagttctaatcttctgaaactctcaaaaggcttataaatgttctgcagttgagaattttcttaatatgtaatagtgattcagatttttttgtcttagtttgtgccccgacttaatggagattgccttaaaaaagaaagatgtacagttgttacaactctgtctacagcagttccctgacattcctgaatcagtcacctgtgcttgcttaaaaattttcttgaggtaagttagactccaatggtcctttttcttcactacatttataatctgttacattatttgatttccaaaattttgatgcttaggaaatgaaatttttcccaaaagcttggtgataaggattaacctcttgctttcaactaccatcatagcattggtgatgacagtcttcaagaaacagatgttaatatggagtcagtttttgactatagtataaattctgtacatgatgagaaaatggaagagcaaactgaaattcttcaaaatggcttcaatcctgaagaagataaatgcaataactgtgatcaagagttaaataaaaagccccaggacgaaacaaaggagagcacttcatgccctgtggtacaaaaaagagcagctctactgtatcctttgacatagagcatccctctgtttctctttataggatatagttatatgccaagcagtaaccaaggagtaactcaataatttaaggtttttctttccttttccaattgttttttgtttctgtttgaaaatagattatgttcaatgctacgttaagtaaggtttacttaaacctgtttaatttaactaggctgggcatgggtggctcatgcctgtagtcccagcactttttgaggccgaggtgggaggattgtctgagcccaggagtctgagaccagcctgggcaacatggcgagacccccatctctacatcagatttaaaaaaaaaaaaaagaagaagctatactaacacagaagctctatcaattctgaagatcagtattctgaataaataccaattaaagtattccacatgatctccaatgattaggagagtgtttggtgatagagctcttttagagatgtaaaacttttgtataaatttagaaaactaacattgacaaaggaagttactcataagttcaatagaatagcttctatttgttgaagtacgattttcctttagtcctaagtaatgcaattcttcattcagcatatagcgagacatttcttctgcctcatttgaaagacatcccagcacagcatatcacggtaagtgttcatacaagttgtatagaattttacttctggtttaaatattgctatttaactctaaccagctgttagggcattctaaaggttatgaaattctttcatgtgaataagaggttgcccagctctaatggcaaaaaattgtgctgagaaaactagagcgatactagggtgatagaccatggcatattccttgtgccaaacttgaaggccaagttaagcttcctaagttataaatgaataaacactaaaaagaattgcagacagaagggttctctctacctattatttacaaacaatgagcttatcaccaccactacccccaaaccagatgagctcctcattaatgggagggactgcattttattcatttttatgtctccagatgtctggcgtatttgtttgatgtataaattgaacatttttttcaatcttcgtgatgggtttatataatagaaattttttctatcaaaatgataaactatccattttttttcccacccagctgtttcttaagtatttgtatttcctgtacctgaagtgtagcgaaaatgctactatgactcttcctggaatacacccacctaccttgaaccaggtgagattatttttttactttgatttggtgctgggaaaaatctgtgaaaaaaagttgtattcaaggtcagcacctgcattcaagagctgacttcttgtttcctaggccgtaggaatcccttcctcataaaaccaaaccactgcagctagaaatggggagtctctcatttagtagatttctagatccataaatctacacgacagaattttaatttatcttaaattcctgattcttcattatgacccttcccttttccaagaatttcctcagccttgatgggagacaacaggaaggggctgataatataggttgcccccttaatcatctcttaagaataagagaacaggccaggcatggtgactcacgcctgtaatcccagcactttgggaggccgaggcgggaggatcacttgaggtcaggagtttgagaccagcccagccaacatggtgaaaccctgtctctactaaaaacacaaaatcatccaggcatagtggtgcgtgcctgtaatcccagatacatgggaggctgaggcaggagaactgtttgaacccaggaggcggacgttgcagtgagctgagatcgcgccactgcactccagtctgggcaacaagcaaaactctgtcccaaaaaaaaaaagcggggggaataagagaatacagattagtgaaaaaatattcccagagaatcccatggtagtccctctttaaaaataatacttatgctgggtgcggtggctcatgcctgtaatcccaacactttgagaggctgaggcgggtggatcacctgaggtcgggagttcaagaccagcctgaccaacatggagaaaccccgtctctactaaaaatacaaaattagccaggtgtggtggcatatgcctgtaatctcagctacctgggaggctgaggcaggagaatcacttgaacccgggagttggaggttgcggtgagccaagatggcaccattgcactccagcctgggcgacaagagtgatactccgtctcaaaaaaaaaaaaaaacttatttaaaaaacagtaagaaacatttaaaaataatgtatttaccctcctacaaaggcatgtctatagttccttgtctttggacatgtaagaattggaggcaaagaaatgtggacttggagaaatctggggccagcttgctctccgcaggctcaagatcaaccatcccacatagaagcagtaaaaacaataaattgttttggtttggtaatatgttattctaacgaaggattttaaacacttaagttggctattcttcatataaaaaataacttctttttttttttccttttcaagaaggcaaggtctcgctcaaccacactggagtgcagtgggaatcatagtttggggcagacatgaatcctgccctgaagcagtcctccccacttaccctcccaagtagctgggactgctggtacatgccaccacaccacatgaaaatacaatttttttttccttttttgagacggagtctcgctctgtctcccaggctagaatgcagtggcacgatctcggctcactgcaacctccgcctccagggttcaagtgattctcctgcctcagcctcctgagtagctgggactacaggcacaagccaccacacctggctaatttttgtgtttttagtagagatggggttttaccgtattgaccaggctcatctcaaactcctgacctcaggtgatctacccatctcagcctcccaaagtgctaggattacaggtgtaagctaccgtgcccgggcaaactacaatttttttattttaatttttcttgtagagacagggactccctgtgttacccaggctggtctcaaactgctgggcttaagtgatcttcctgtcttggcctcccaaagcatgtggattacaggcatgagacacttacctagcctaaaaataagttaaatttttcagtggttattttttatttatttatttatttatttaatttattttctttctgagacagagccttgccctgtcacccaggctggagtgcagtggtgcgatcttggcttactgcaatctccacctcccaggttcaagcaattctcctgcctcagcctcctgagtagctgggattataggcccccaccaccatgcccctgtgcttttagtagagacaggatttcaccatgttgtccaggctggtctggatctcctgacctcaagatgatccacccacctcagcctcctaaggtgctgggatgacaggcttaagccaccgcacccggcccactcagcactgttttagacatttcctggaccagtagacatacatctgcctcattccttttaaccaatgcatactatttcattttacaaatataaattaatgtacctatcaatcctctattgatggtcatttgtttaccattttttgctgttgtaaatcttcagtgaggatctttatacagatattcttgtatatttatgagaatgcctgttgaatacattcccacaagagaaattattggatgaaatagtacatgcaatttttagttttcaaaatgccagactttctgaagagttgtgacaactaccaccagcaaggtctgaggcattctttttcacattcttactgacattcagttttgtcaaacttactttttgccaatcagatgggtaacaggtgttacctcattttaatttgcatttctttgataatgagagaaggaaaccgtctcttcttgtccatttatatttgtttttgtgaatctgcctagtcgggttctttgtccatatgtatattgcatttcctgtcttttggtttataaaaagttccttttatattaaggaaattagcctttttctatcaaatgcattgtaagttatttgtctttttactctctttagtataatttttgacagatactttttcatgctattaaaattaaagttttcctctataacttctttatggcttatgttatgtttaaggcccttcccactctaagattatgaaaatagtcaccagctttccctactacatggttttatttcttgtgtttaactctttgatacatatagaatttaatctgatataaggagttccttagggatcagctccccctcccaaatggatagccagtttcccggttgctttgatatttgcatgttaactacaccactggaagatgtaggactacataagaaacttctataaatgcttagtaataattctggtttatggcaactcatctataatacacaacaccttgtccttggggaaaatttatcttgcagaatagaagatgagtggttatttttttgtgtgtgtgactgaaaattattgaaactgaaaactaaaatttttaaaaataaaaagacaactactggcgcggtgtctcaagcctgtagtcttagcactttgggaggctgaggttggaggattgcttgaggccaggaattcaagaccagcttggcaataaggcgaaaccccatctctacaaaaattgctaaaaagtagctgggtatgatggtgcatctgtaatcccagcaactctggatgattgcagctactctgggaggttgaggcaggaggatcacttcagcccaggtgtttggaggctccagtgagctatgaattgtgccattgcattcctactccagcctgggtgacatagcaagatcccatctctaaaattttttttaattagaataaattttttaaaagccagaaatgagcctttttatatttcgtagaaattgctccatctctaaacaaaaatgttcagattttatttataaagacttatttttctcataactgtttatttatggactttgtaaagtgaattaacctgaagttaaatttaaaatcttaacttccttttcctattcatcttcagattatggattggatatgtctacttctggatgcaaattttactgttgttgtaatgatgccagaagcaaagaggctactgataaatctttacaagcttgtaaaatctcaggtttgtgattatttgatatatactgattttatttgtacccaagtatcacctgaattacaattattcttaaaatttgtccttaaataacttactcatggaagatttgtttctatgtagacattatggtaaaagttactctgaaactcttttctttagatatctgtttattctgagctcaacaagattgaagtaagttttcgggagctacagaaattaaatcaagaaaagaataatagaggattatattcaattgaagtgctggagctcttctgatattatcaattctccttcatagacattttataaagctcttttatgtgaactcttgcttcatccaggcaagaacggtgttttgtttgcgaccatctcagtgtcaagagaaacgtgtcagtgagtacctggaccatcacttaactgatgctccggggtaggactgcaggtttcacatgaacctgttctaggctgtggacattggtgtggagaggttctgcaattttttaaaaatatgtaactgggttgattttaagtaaaattatttgtgtattgataaaagtctaatttcttatcatgtgttttgaattttttcttttaataaaaaatgaccattgaagcagtgattctaggaagaatgtaattttatcagagtcagaagctgcccctgctcatttgttccacagctcacctttatttcacacatttgcagtgtgtcttctgccacaagcagggcagagaggggccctcacacaggcacgtgattgcctcctgcggtctcccctgtcctttaggacaaatgaaaagttcaagtgtgattctacagcccagctttacagaaagaatcctgatggctgaatttaccttgcagtagtgaaaagctgcgttttaggtcaggcactgtatgtaaactttagtcacacatgtggccgttaataaacaggttctcctccattgtttttaatctctcagtaggccttaatgaaaagaaatcccaaaggaacagggtaaagcctctattaatgatgacattctcagctgggcacggtgacccacgcctgtaatccaagcactttgggaggcggaagcgggcagattacttcaggttaggagttcaagaccagcttggacaacatggtgaaaccccatctctaccaaaaaatacaaaattagctgggcatggtggtgcgttcctatagtctcagctattcaggaggttgagatgggagaatcacttgaacccaggaggcggaggttgcgctgagccaagatagcaccactgcactccagtctggatgacagagtaagaccctgtctcgaaaaaaaaaaaaaatcggccgggtgcggtggctcacgcctgtaatcccagtactttgggaggctgaggcgggcagatcacctgaggtcagaagttcgagaccagcctgaccaacatagagaaaccccgtctctactaaaatacaaaaaaattagccaggcatggtggcgcatccctataatcccagctactcggggaggctaaggcaggagaatcgcttgaacctgggaggtgaaggttgctgtgagccaagatcgcgccattgcactccagcctgggcaacaagagtgaaactccttaaaaaaaaaaaaaaaaaccatgttctctttatgtaatgggaccttttgctcagcggtaatacagtacttagcagaaatgaaaaatacggtctccatggtgcatatcccctttttatttatttcatttatttatttatttatttatttatttatttatttatttcttttttgagacggagtctgcaagctctgcttcccgggttcatgccattctcctgccccagcctcctgggtagctgggactagaggcacctgccaccaggtccggctaatttgttttgtatttttagttgagatggggcttcactgtgttagccaggatggtcttaatctcttgacctcgtgatccacccacctcggcctcccaaagtgctgggattacaggcatgagccaccgcacccggcctatttatcatttttttcagatggagtcttgctctgcctcccaggttcaaggaattttcctgcctcagcctcccgagtagctggaattacagacatgcctcaccacacccagctaatttttgtatttttagtagagacagggtttcaccatgttggccatgctggcctgcaactcctgacctcaggtgatctgcccttcttggccttccaaagtgctgggattacaggcgtgagccaccacgcccggccccacctttttatctttttttgctgaaccatttaagaattatctgcagacatccagataatataaaattatgagttcctaagcttttctttataagaattttgagctttagcgtagtggattcttattttatatctaagaacccataattaaagagacaagtctcattgatctgtgaactcttagccagtaaaaagaagataaacaactgaaatgcagaggcagtcagttcatagattgacattttactcttcatgacttttgatttaattttgtacttaaagactggcttctgcattgaaaaataacttacatggtaaggaatcagatacttgacgaaatgtaactaccacaaacaagactataaactgtattatggttttcagaattatatgccattttaattagagtagaaaattgtaactgcctttatttcattttgtttttgagacagagcctcactctctcgcccaggctggagtgcagtggtgcgatctcaactcactgcaacctctgcttcccaggtttatgtgattctcatgcctcagcctcccaagtaactgagattacaggcatatgccaccatgcccggctaatgtttgtatttttagtagagacagtctttccccatgttggccaagctggtctcgaactcctggcctaaagtgagttaggccacctgcctcggcctcccaaagtgctgggattacaggtgtgagccactgcacccgggcataattgcctttaaatagtagttataaattatttctaggttacctgcaatctaaattactaaaagtaaactaggattttaaaaagatatgcagacactctgataggctgttcttcaaggcaaggactaagcctaggtccactgggacataacaggtgttatggttagtgaataaagtctttgaataatagattttatctaactacagagtaaaattctgacggtttgctatagttccttttcttggaaagtaaattatccatgttcatcatatataggcagtgtgtcttcttcctctaggccatataacactatatatctcagatttatttctgattatataatatatactacatctatataacaataaaagaattgttctttaaactgaagttccatctagaaaatgacttttgaccgggcgcggtggctcacggctgtaatcccagcactttgggagcctgaggtgggcagatcacttgaggtcaggagttcgagaccagcttggccaacatagtggaaccctgtctctactaaaaatccaaaaattatccgggcctgttggcgtgcgcctgtaattgcagctacttgggaggctgaggcgggagaatcatttaacccaggaggtggaggttgcagtgagccaagatcgtgccattgtactccagcctgggtgacaagagtgaaactctgtctcaaaaataaaaaaaggaaatgacttcctcttatgaaccttatctgttttccgaaggaaatgtgggctaacgggttattactacttaacatgcggcatttatttgctttttgcctccttagccttctttgtaattgttggtgacatcattatggttgagttcattctggatcatatatccagttcttttttgaacagtttaatcttaaaaaaaaattgcaagcaaaaacaacacccatatacccttcatctaaatttaccaattggtaacattttatcatgtttgctttgctaatctctgtattttttctttcgttcctaaaccactggagagttatttgcagacatccagacacttcagcttaatcccataaatacttcagcttaatcctctaaaacaagggcatcttctgcatgaccacaatacaacgatcaaattcagaaaatttatattaatggagtattgttctctagagtgattacagtctatattctgatttccacagttgtcccagtaatgtctttcatagctgaaggaaggaggaggggatctttctggtagttgcacattgttgccaaaatgaaattcttttttcttggaagtatcttccctctaattccatacttgccaagcaactgacactgatttactctcccagaaacacaaataccaggatggggaggctctatatgagaggtaattacagtttcctaaattggcataatccctgtaaattgacaaattgaaattcttgtctaaatttaatttcatgtgaacctaattatccttggctacttttcatctctggatgaattcatatgctttgggttgtcagtgccaaatttgttatgctttgtttaatacgttcagaccacagagctgacagcatctatttcttctggtttgtttggttatacaccaggtaagggatagttaatatacagatgttttatattacttcaaaatgaatttggaccaacagggcacagtggctcatgcctgtaatccaagcacttcgggaggctgaggcagggagatcacttaagctcaggaaatgtaactaccacagtagtcgggtaacatggggagaccctgtctctacaaaaatttaaaaattagctggttgtgttggtacgtgcctgtagtcccagctacttgggctgacatgagatgatcgtttgagcccaggaggttgaggctatagtgagccatgtttgtgccactgtactccagcttgggtaacaaagcaagaccctgtctcaaaaaacaaaaaaaaaggaaagaagtaaaataaacttgggcttgcgcagtggcttacacctgtaatcccagcccttgggaaggccgaggcaggcagatcacttgaggccagaaattcgagaccagcctggccaacatggcgaaactccatctctacaaaaaatacaaaaattagctgggcgtggtggcacatgcctgtaatctcagctactcaggaggctgagccacaagaattgcttgaacccgggaagcagagtttgcagtgagccgagatagcaccactacattccagcctgggcaacaaagtgagactatctcaataaaataagattcacttagagaacaataaacttgaagaaaatgttcttggatttgcatagaccacatgcaccatttctttactttacattactgggttggacaatagcttataatatgcaacagcatactctacagaattcagtttgcactattttcaagtttagtgcatgattcccttaggaaaatcaggaagtttaagtcttctattagctttggtataggctttttatttatgcattgcctctttcacaaagagacatgtacaataaaatagtataataaacctaggaaaggtggacacaaacacaaaactgcaaaaagtcaacaaaattttagctcacagagactgattatgtattttaaacttgtgtaggttccttctttttctttttattatagacaactccaaacataaaaaaaaaaagagtttaacaaataccatacatatcgcccagcttcaacagttatcttttttttttttttttaaccaggtctcggtttgtaacccaggctaagggtaccgtggcgtgatctcggcttattgcaacctccaccttctgggttcaagtgattctcattcctcagcctctcaagtggtggggatttcaggcatgcaccaccatgtccagctcatttttgtatttttagtagagatggggttttgtcatattggccaggctggtctcgaactcctgacaaggtaatctgcctgccttggactcccaaagtgctgagattacaggtgtgaacccccatgcccagcctcagtttcaatttctttttttttttttttttttttgagacaagagtctcactctgttgcccaggctggagtgcagtggcacgatcttggctcaccacaacctccgcctcccaggttcaagtgattctcccacctcagcctcctgagtagctgggactacaggcgtgtgtcaccatgcctggctaatttttgtatttttaatagagatggagtttcactatgttggccaggctggtctcgaactcctgacctcatgatccactcgcttcggcctcccaaagtgctgggattacaggcgtgagccaccatgcctggctggtttcaatttttgaacaaaggagattagttcaagggaaggactattatggcctctgcataaaaataagcaaaagcaccagcctggccaacttggtgaaacctcatctctactaaaaatacaaaaatttgccggtgtggtggtgggcacctgtaatctcagctgctcaggaggctgaggcaggagatcgcttgaacatgggaggcagaggttgcagtgagctgagattccgccactgcactccagactgggtgacagagcaagactctgtctcaaaaagaaaaaaaaaaaaaatggaatgaccaaaagcaacttagtctggtagaagcaagatggagtcagttatgtcagacttccattactactataatttctgcaaaggcaatttcaaaatctatggtgattatggttaatagattatatacacgaaaattgctaagagaataaatgttgagtattctaccacaggcaaaaataagtatgtgaggtaatatttatgttaattagcttgatttagccattccacaaggtatatatatatcaaaagattatgttgtacaccaaaaacaaaaaggaaaaattattttactggaaaacacattgtgaatatttttttccttccattaaagcaaaagttggccaggcatggtggctcaggcctgtaatcacagtactttgggatgccaaggtgatagcagcaggaggcagacaaaccctaggcagacaggggcagatccccagtgaaacccaaacttcaagccaaagacagtttaaagcctagctacaagtcctgggtaagtccacagactggattgggaaactgtcttcctgtttggcacactttcctctgattgatccccaccctgcacctgttttacatgtatatacccttccctaattggtgtattacactgtcgtgcccacctttgagtggtgcctttgttttagcctttttttgcttacccacaaaccaatcagcactccctattctgagcacataaaagccccagacccagccacactgagtgagagaccacctgactttgagtaggggaccaccctcacatcccgtctctactgagagctgttttgtcactcactaaaattcttctccaccctcgtcaccctttattgtcagtataacctcattcttcttggacaggggataagaacttgggacccaccaagcacgggtacaaagaaggctgtacaccctccaccagtggagagcagctgcctcatgtgatgggaagcagcagcagggccaagccagccctggagccttgggccagagcagggcaacaggactgatggtgttgttaacatggcattgtccatcaggctgcggacaaagggactaaaagagctaatttgcatgccgtaacaccccctctggggcttcagggtcatgggcacccctgcctgggtgccaccgtgttcccctcctctggatgccagagtccaccatgggagtcacttgtgacatgcctggtccagctacaagccccacatggagcccattcccctgccagcacttggaacggccagccagaccccacactccctcactcacacaccccgtcctgccaggggctaagcacacagtagtggcagctatgggacctgcactggagtgcaagccaggtgcagcccagcaggctgagtagacagggtgtctcctgcagcaagcccaggcctgagcaaggcctgggcaggggagttgccagctggaaatctccagctggcaaagtgactaagaaaaatcctgcatcaaaggtgggaggatctcttgagcacaggagtttgagaccagcctgggtaaccccgtctctacaaaaaataaaaaattagctggtcccagtggtgcctacctgtagtcccagccacttgggaggctgaggtgggaagatggcatgagcccaggagttccaggctgcagagagtggcatgccaccacactccagcctgtgtgacagagtgagagcctgtctcaaaaaaaataaaagagtttgatttctttgatgttaagtgtcctcaatgaacaggagcctgacccactttgttggttttcttttcttttcttttttttttttttgagacagtctcgctctgtcaccatgccagagtgtagtggcgcaatcttggctcactgcagcctctgcctcccaggttcaagcgattctcctgcctcagcctcccgagtagccaggactacaggtgcatgccaccatgcccagctaatttttgtattttttagtagagatggggtttcaccatgttggccaggatggtctcaatctcttgacctcgtgatccgcccacctcagccttccaaaatgctgggattacaggcataagccactgtgcccagccctggtttccttattgaaaggcaaaatttcttttacttacacaatgggtgagtgttaccttgttgttgggctgattaactgtagcagcaatagaaatgcaaagaggtgtgtggaatggggctatgggctctgaatatagtcctctgtggatgtctttgtgaatgctgattactcattcaaatgcagaatattctgctttttgctaggagccgagaagtaatagatttacagacctcttattcttggtcacccttgagggtggaaatagctttattataatgcatataattcaatacatattctcctggatttaaactcaatcttctggctagtgatccttaaatttttatctctagctctgacttccccactaattcctaaatttgaatttccactgcctgattaacatttttgattagatatctcaagcttaatgtactcaaaatggaattctggattttccccccactttttttttttttttttttttttgagacatagtttcgctcctgttgcccaggctggagtgcaatggcatgatcttggctcaccacaacctccgcctcccgggttcaagagattctcctgcctcattctcctgggtagctgggattacaggcatgcaccaccacacccagctaatttttgtatttttggtagagatggagtttcagtatgttggccaggctggtcttgaacttccgacctcaggtgatccacccaccttagcctcccaaagtgctgggattacaggcgtgcgcccctgcgtccggccaattttcccccacttctgttcccctcctcaatcccaccttggacttcctgggtacttggcacctcacttctcgaatccctcatccatcagcaattcctgtgcaccttccctgtgagatatttcccaggtgcagcatgtctggtccagctgcaagccccacatggagtccactccggtgctggtgcttggaacggctggtgccccattccctgctccatttccactgtggccaccgacccgttctccagcatctctcgccctccccactgcagcagcccccaactgactgcctgctttccctctggcttctctcctattagaatattcttctcacagcagatgatcctaaaacataaatcgtatcagttcacatgccctttaaaaagtttcctcatactactcttagcggtgcataaagaaagaaaaacaaacaaaaattgaaaaacaaaaaagttctggcgaggcatggtgggtcatgtctgtaatcacagcactttgggaggctaaagcaggaggatcccttgaggccagaagtttatgaccagcacgggcaacatagggagaccccatctctacaaaaaataaagaaagaaaaactaaggctcggcacactggctcatgcctataatcccagcactttgggaggccagggtggacagatcacctgaggccaggagtttgagaccagcctggccgacatggtaaaaccccatctctactaaaaatacaaaaaattagctgggcgtgatggcgcaaacctgtagtcccagctgcttgagaggatgaggcatgagactcacttgaaccctggaggcggaggttgcagtgagccgagattgcaccactgcactccagcctgggtgacagagtgagactctgtctaaaaaaataaataaataaataaataaaaattaattaattcaataaataaaaagtttccacgtactgatccatgctataacatggatgaatctagaaaacatgacgctgaatgaaagaagccagtttaaaaaggctgtgtgttgtatgactctagttgtatgaaatgttcagaagaggcaaattcatagagacagaaagcaggttaggggttgccaggggctggggctgcagcgggcaggcggtgggtcggggaaggatggggagtgactgctgaaagggtttggggttttccttctggggtgaggaaaaggttctggaactggataatgatgatagttgcacaacattgagtgtactaaatatcactgaattgtacacattaaaatggcaacttttgttttgtgaattttaccatttttttttctaaaaaaggtttaatgacttcttgttgcggtcttaaaatagaagccagggccgggaatggtggcttatgcccataagctgtgctttgggaggcggaggtgggtggattgcttgaggtcaggagttcgagaccagcctgggcaacatggcaaaaccctgtctctacaaaaaattagccaagtgtggtggcatgcgcccgtggtcccagctactagggaggctgaggtgggaggatcacttgtaccctggaggtggaggatgcagtgagccgtgattgcaccactgcactccagcctgggcaatagagctagaccttgtctaaaaaaaaaaaaaaacaaaaactacaatccaaattcctgactaaggcccacagagcactgcatgatctcgccaccctacctcctctccttcttgtgctctgagccttgctctacctgctctaagctatgggctcaggaagtgatgcactaaagtatggcgctttgggctgggcgcgtaatccccacactttgggaggccgaggtgggctgatcacaaggtcaggagtttgagaccagcctggctaacatggtgaaaccccgtctctactaaagacacaaaaaattagccgggcatgatggcatgcacctgtaatctcagctacttgggaggctgaggcagcagaatcacttgaacccaggaggcggaggttgcagtgagccgagattgtgccattgcactccagcctccagcctgggtgaaagggtgagactccatctcaaaaaaaaaaaaaaaaaaatatggcactttggcatgctgagtattttgaactaatggagactggaggcaacctcagaaccaaggtctctctgatctcctgctcacaacctcttccctaaaacacaagaaggggtctctctgaatttcccttgtctgcctaaagacatgaaactgcctttgcaaaaattatgacagtgagataaatctgacatagtgccttcatcttgcttctaacctcacaagctaactttttgctcattcatgggcctaggccaagctaactatggaagtttagtttacagtttcactttaaaagatgattaacagttccttcccaaaatgaatcccctatttgctgtgggaccgaaaccacctttgtaaatctaacaaattggccacaaggttggaattacagttcaggagtcatgttgccagaggtgaccagatttgtaacccaccccccaattgctcctatagataacatcattatgataaaacctaagtgtggtatttgaggtatttttcctttttttttttttttgagattgagtctcgctgtgtcacccaggctggagtgcagtggcgcaatctcggctcactgcaagctccgcctcccgggttcatgccattctcctgcctcagcctcctgagtagctgggactataggtgcccaccaccacgcccggctaattttttgtttttttagtagagacggggtttcaccatgttagccaggatggtcttgatctcctgacctcctgatccacccacctcggcctcccaaagtgctgggattacaggcgtgagccaccgtgcccagcctgaggtatttttcagaccttgcattctgatggaccagctagcaccacctgaaccagtaacctataccaagaaactgactcaaccagtcctgccaccccactctggaactgactcagggcaagaagacaccttcaaccccctgtgatttcattgcagacccaaccagtcagcattacctgttccctagccccctgctcgccaaacaattcttgaaaaatcccagcctctgaattctcagaggagtggattgagaattatctgctgtccttccactcggctgccttgcaatcattaaattctttctctgctgtaacactcctgctgttctcattgtattggcttttccaggcagcaggcaggaagaacccattgggcaattacagatagactttctagaaggaatagaattgtcatgaatcccctccctaggagtctcatcaacaagagaagattaactgtatcataggagagactgaaggttgaccccacacctagagttcatcacagactatcacctgttcttctgagggctgctgcaagagaacttctattacctgcgagatcttttatctgcataacaagacaacctctgctcaccatgcatttcctctcctcaccctctcataacttgtcaccactactcccccagaagccacaggcccctctattgctttcagtagctacagtcttatattttgggactcacctgcacaagaaggtaattaaaatgatttttctcctattaatatatccattgtcagtttatttcagagactcaattttttttttttttttttttgagatgaagtcttgctctgttacccaggctggagtgaagtgatgcaatcttggctcactgcaatctccaccccactgggttcaagcaattcttgtgcctcagcctcccaagtagttggcttgtgcctcagctcccaagtagcacatgtgacaacacccggctaatttttgtatttctagtagagatggcgggtttcgccactttggaaggccaaggcaggtggatcacttgacgtcaggagtttgagaccaggctggccaacatggcgaaaccctgtgtctactaaaaatacaaaaattagccgagtgtggtggcgcgtgcctgtaatcccagctacccagaaggctgaggcaggagaatctcctgaacccaggaggcgaaggtttcagtaagctgagatcacgcctctgcagtccagcctgggcggcggagggcgactccgtctcaaaataaaataaataaataaatatatctgtgcatgtagaataaatgaagttttaaaaataaaaaatacaaaacacttcctttgtacctttttttttttttttttttttgagatagagtctcactctgtcatccaggctagagtgctgtggtacaatctcagctcactgtaacctctgcctcccgggttcaagcaattcttctgcctcggccaccttagtagctgggattacaggtgtgcaccaccatacctggctaatttttgtattttcagtagagatggcgtttcatcatgttggccaggctggtctcgacctcctgacttcaagtgatcctcctgccttggcctcccacggtgctgggattacaggtgtaagccaccttgcctggctcctttgtaaatgttaatggagaaatatatatatatactacctatgtaagagatcttaaatctcttaatgcaaggcatttttttgtatttggccaggaactggagaaagtgtgtttgtcaaccagacattgggcaagagactaaccagtgctcaagacctggcttgaagctgctgctaatatatagaagttaaaacttggcctgcctctgaagaaggtgcagcctctgcaggagcaaaagtcttttagcacaaggggtaattcaggaaaagtacaaatgtttacaggcctcattttttttttttttgagacggagttttgctcttgtcacccaggctggagtacggtggcacaatctcggctcactgcaacctctgcctcctgggttcaagagattctcctgcctcagcctcctgagtagctgggattacaagtgcctgccaccactcctggccaatttttgtatttttagtagagatggggtttcgctatgctggccaggcttgtctcaaactcctgacctcaggtgatccacctgccttggcctcccaaagtgctgtgattacaggagtgagccaccacgcctggcctacaggcttcattttttattcctcagtcaaaatgacatgagctttattgcatcttatgaaaagagaaagatacagtgagatgacctaccttcttaactagaagatttcagcaaagaaatcattaccccttgttaccaagaaaacatctgggtctgtcctgagcaagcagcattctaaacttcttaccttgtttttagatagtgctttagttcatcaagtgaccttccatgcattagttcatcttgtctttgaattcatttctgtgggtaggtattacttttttctttctttgagacagaggcttgctctgtcgcccaggctagagtgcaacagcgtgatctcctctgcctcctgggtcaagtaattctcctgcctcagcctcccaagtagctaggattacaggaacccaccatcacacccagctaattttttgcctttttagtagaaatggggtttcaccatgttggccaggctggtcttgaactcctgacttcaggtgatccacccacctcagcttcccaaagtgctgggattacaggcgtgagccagcacacctggccagtattactattatttaaaaagtgcttagaggcagtgtcttgctctattgccccaactgaattgcagtgatgtgatcgtagctcactacagcctcaaaatcctaggctccagtgatcctcccacctcagcctcccaagtagctaggaccacaggtgcacaccactacgctcaggtataaatacatatatatatatattttttagagatagggtctcactgtgttgtccagggtggtcttgaacttttggcctcaagtcatcctcccacctcggcctcccaagttgctaggaccacaggtacacaccaccacatccaggtttttggtttttttttttggaaacagggtctcactatgttgcccaggctggcattgaacttctgtcctcaagtggtcctcctaccttggcctcccaaagtgctgggattacaggtgtcactgttattctcactttgcagatggggaaaccgaggctcagagagaccatatgatttgcctagaatcacagagcaaattagctatagcacaagggccgaatgtgttcaaactcaactttgagcaagttgcttggcttcaccaagcctccctttctttgcttccctccaatcctttccacgtacctcagagattacaaagcaaaatgaaatgaaataatgcgagcaaagtacctggctctggtcatatatcttgaatctagatttgctattgtgatttttccatttagtaaaactgacacagcccttccgaggttgcgcataatagactgagagaggactggcagctctttctcttttgttctgcatctacgtttcctgaaaggccagagaactgagggctgggatctcaggaccagaacatctgtaaatctgggtcttcccagcttcttcctgtgtgtttttcataccacacacgtgctcacacacacacacagatgcttgtgcaaaggaatttccaacttggacagagcgaaaggaatgtatattgaggcccacgatagccagaaaaataatctggcctggccctattcccagggccaggcatccccgatgtcatccacatgagtccacacccagtcaccccctgacctactgcctgcccagcagctccacggctctcccggagccaccctcttttgggacagggtgtacattggctagactcaaagggcaggaggtgacaggccccagagaggagaggaaggaagggaggccctctccctaacacactgcaggctaatcccctggaccacagcacttcagccaagaagctctgctcaccacacccttgcaatgggtagtgggaaattaaagctgttccagagataaagcagctcccaaacccttgtttaccttgtaggcaaatgaggattatctctgttctctactttgcctatatgaccatagcaaccaggtgtctttcaacttttcggtttctcaaagcctcgagcctcttaataaggagcagctaatctggaggcactttcttgttcttatccacaccgaacactctctgccctgtgccatggctgtttccctcgacagtaactgtagaccccgctctttcacataaaatgagcccagtgatttcattttaccttttagaaactatcactgaatggccaggcatggtggctcacgcctgtaatcccagcactttgggaggccgaggcaggcaggtgacaaggtcaagagttcgagaccagcctggccaccatggtgaaacactgtctctactaaaaatacaaaaattaggccaggcgcggtggctcacgcctgtaatcccagcactttgggaggctgaggtgggtggatcacgaggtcaggagatcgagaccatcctggctaacatgatgaaaccccgtctctactaacaaaaatacaaaaaattagccgggtgtggtggcgggcgcctgtagtcccagctacttgggaagctgaggcaggagaatggtgtgaacccgggaggcggagcttgcagtgagccgagatggcgccactgcacctccagcctgggtggcaaagcgagactccgtctcaaaataaataaataaatacatacatacataaaaataaaaatacaaaaattagctgggcatggtggtgggtgcctgtaatatcagttactcgggagcctgaggcaggagaattgcttgaacccgggaagcagaggttgcagtgagccgagatcgcgcccctgcactccagcctgggcaacagagcaagactccgtctcaggtaaaaaaaaaaaaaagaaaagaaagaaagaaagaaagaaaccatcactgagagaactctatagagtttaggccacttaaacactggtttataaaatgaaaaaactattttaaataagtatacctgtgcatatgaatattacaatgcaatattctctttctatggattactgccttgtgaatgaatcagtgtttcactacaaaagggggctggacaatatgcatgcctgaactttcctaactgatatcattttgctttaaggccaacctatcatctcaaaataattttaatttaatgtttaaaaaaagaatttagcataagatgatagagacggagaacaaaagaaaaaaataatttaggttttctactacaaagaaatcacaagggtataatagagagagggaaggataacctatgcattagaagaaacttaaaagccatatcagccaggcactgtggctcatgtaaccccagataggggtgctaaggtgggaggatcaattgagaccaggagttcaagatcagcttgaacaacatagcaagactccatctctaaaaaaaaattaaaaatgcggcagggcacagtggctcacgcctgtaatcccagcactttgggaggctgaggcggacggatcacgaggtcaggagatcgagaccatcctggctaacatggtgaaaccccgtctctactaaaaatacaaaaaaaaaaattagcctggcgtggtggcgggcgcctgtagtcccagctggtcaggaggctgaggcaggagaatggcgtgaacccgggaggcggagcttgtagtgagccgagatcgcgccactgcactccagcccgggcaacagagcaagactccgtctcaaaaataaataaataaataaataaataaataaaaacaaaaatgctttttaattaaaaaaaaggacataaccaattgcaatatggaaactttatttgtatcttaaacaacaaatctttaaaaatgtctgacttatgaaacaaacagaaagttgatttccttttttttcttttctttgcttttttaccccccgcccccagagtctcactccatagtccaggctggagtgcagtggcgtgatcttggctcactgcaacctctgcctcccgggttcaagtgattcgcctgcctcagcctcctgagtagcggggattacaggtgcgtgccacgatgcctggctaatttttgtatttttagtagaaacgggattttgccatgttgaccaggttggtctccaacttctgacctcaggtgatccgcctgcctcggcctcccaaagtgctatgattacaggtgttagccacggcacccagccatcttttttttttttttaaataactgtttcaatgagacagtatcttacttctggaatcttcacagagaaacaaaagagagagagacgtattttgctctgtcacctaggctagagtgtagtggtgtgatcacagctcacggtaaccttgaactccttggctcaagggatcctcctgcctcggcctccacccttcttagcctcccctgtgccaccatgcctggcttttttctacattttgtagagacacgttctccaaatgttgcccaggctggtctcaaactcctggcctcaagtgatcctcctgcctccacttcccaaagcactgggattatgggtgtgagccaactcgcacagccagaatgtgcatttttaacaaaattcccagagtatgagagacagatttcttcagggaggtcacatgcaacttagtgttggcattttcatacactgttgttatatagtctttctggaggatgacttatcaatatgcttcaaaaaccttacagtgcagccaggcgcagtagctcatgcctgtaatcccagcactttaggatgccaaggtgggtggatcacccaaggtcaggagtttgagaccagcctgaccaacatggtgaaaccccctctctactaaaaatacaaaattagctgagcatggtggcgcgcacctgtagtcccagttactcagaaggctgagacaggagaaccgcttgaacacgggaagcagaggttgcagtgagccaagatcgcgccattgcactccagcctgggtgatagagcgagactccatctcaaaaaaaaaaaaaaaaaattagccaggtgtggtggcatgtgtgtgcctgtagtcccagctactcagaaggctaagcaggagaatcacttgaacttgggagccgggggttgcagtgggcaaagatcatgccactgcactccagcctcggtaaaagaccaagactccatctaaaaaaaaaaaaaaaccttacagtgcatatatgctttaatccaacaattgcatttcaaggaatttatcagagatctgtacaaagatacatgtgacaagggtgtccatcatggtgttccttatagtagcaaaaagtgtaagctaaatagccaataataggggagtaattcagtaatttatatgaagaaattatatgcaatctttaaaacttatgttgtaaggttatttattagcatgggaaaatatacatcatatatttaatggaaataaacaggctttaaaacagtttatggattctgatactatttactaatgatactatttatacatggaaaaatactttacatcctgattattttgataggtagcattatgggtgattttcttcttcttcttttttttttttttttgagacggagtctcactctgtcgcccaggctggagtgcaatggcgtgatcttggctcactgcaacctccgcctcctgggttcaagccattctcctgcctcagcctcccgagtagctgggattacaggcgccaccaccatgcccggctaattttttgtatttttagtagagatgagggttcactatgttggccaggctggtctcgaacttctgacttcgtgatctgcccacctcggcctcccaaagtgctaggattacaggtgtgagccactgtgcccggccttatgggtgattttctttgtgttttctgttccctaaatgttagacacaatagttatttcctattgtaattaagagaacaactattctctatgttttgtttttttaaaaaaaggtgtaaggaagcagcgcaatttacaacaaaaactattctcttaacacgggaaacaaaagaaaatgaggaaatgttcccttcggataatttatcatttcccttcccttaattaattaattaattaattatttttgaaatggagtctcactctgttgcccaggctggagtgcagttgtgcaatctcagctcacttcaacttctgcctcccaggttcaagcaattctctttcctcagcctcctgagtagctggaattacagaatgtgtgccaccacacccggctaaatttttgtatttttagtagagacagggtttcgccatattggccaggctggtcttgatctcctagcctgaagtgatccacctgcctcggcctctcaaagtgctgggattacaggtgtgaggcaccgcacccggccagggaatcacttgttctatgaagcagaagaaaatctcctgaatctgtgtctttattttattgataagtcagccaaagagttttaacctgatcttcacaaagactgactgggagacgtggcccagggtccaggtgggcctgatgggcttaataaactctgggctttggaaggacaagtgggtacatctgaggaaacctgcagaaaaaagggccttgggaatgtcatcattcccaagatagtttgctgagaagcccctgtcttcacacatttggacagtgtttagctaatgctggaggacaggctggccacactgccatctcagctttcctaaacccacggcagctcccagtggcaacccaaggttagggaagcccaagaggaatgaggcaggcattggagaaaagccctgagccctgtgagggtcaccatcagtagcaaacatttatgggatgcctggtgtacaagtaaggcatgcagagccaagttggagtttcacctttgccattagctagcagcatgatttgaataaatggctcaaacgttcctttggtcctgttgtcctcatcaccagcaaggccaggcggctgtcctccacaacctccaatccatctgctcttctccatccatcccccttgatatggtttggctgtgtctccacccaaatctcatcttgaattgtagctcctataattttcacgtgttatgggagggacccaatgggagatagttgaatcatgggggcggtttcccccatactgttctcgtggtagtgaaaaagtctcatgagatctcatggttttataagtggaaacccctttcactgtcttcgtctggtgccatgtaagacgcaccttggttcttccttcgccctgatgattgtgaggcctccccagctacgtggaactgtgagcccattaaacctctttttcttcataaattacccagtcttgggtatgtctttactagcagcatgaaaatggactaatacagccctcgtcaccaccttaatccaagccaacgtgacctcttctagacaactgcaaaagtatccgtatcagaatcagctttaagtatcaaaaaacccgattacagcagatgaaagaagcaaagcattaccttactcatgtgacaatgaccatggaaagaggcaccccaggatagttccgtcttcctgccccatcatctgcaatgcttcacaagatagccactcacctccagggatcacatctgtaacccaaacaagaagaaaagaaaaggccaaaggtcaagggcaaaagccttctcacttggtctttgttccttcattcgggaagggaaaccctcccccagagacctgtgcctgcatctcattggccaaagctgtgtcacatgacatggccatccccagctgcaagggagcctgggaatgtggggttttgctctccagccagtatagcaagggaaggcaaaggagaagaggttgggtgagccatcctacagaatctcccacagcatccttactgcctccctggagccatcctttcttcccccagtgcatgagccaccagtttttgttgttgttgtttttgagtggggaggtcttgctctgttgcctgggctagagtgcagtggcacaatctcagcttactgcagcctcaacctcccaagctcaagtgatcctttcccctcagcctcccaagtaacagggaccacaggcaaaacccacaatgccagactaactttcggatttttttcagagacagggtctccatatgttgcccagactggtcttgaactcctgagctcaaatgaccctctcgcctccacctcccaaagtgctgggattacagatgtgagccactgtgcccggcctataccaccaactttttatttatttatttattttgaaatggagccttgctctgtcgcccaggctggagtgcagtggtacgatctcagctcactgcaacctccacgtcccaggttcaagcaattcttctgcctcagcctccggggtagctgagattacaggtgcccattaccacgcccggctgatttttctatttttagtagagacagggtttctccatgttggccaggctggtctcgaactcctaagctcaaatgatctgcctgcgtcggcctcccagagtgctggagaagtgctacaggcatgagccaccatgcccggccatcaccagctttttaaaagctcaaatcagagtgcactgacgataacataggtgacctgtaagactggatgatccacttctttgctgcttctccagctccctgcctccctcctttcataaccccacagtgctccaggcatacaggtcttccttcagtcctgtgactatgtcgagctttttcctaccacaggtcctttgcacatgcaatcccctcagccacagcatggctgactgcttatctctgaggactcaacttgaatgtcacctcctcagagaagcttgccctgaccacttttttttttcttttttttgagacacagtcacactgtatctccaaggctggagtgcagtggtgtgatctcagctcactgcaacttctgcctcccgggttcaagtgattctcctgcctcagtctcccaagtaactgggattacaagcatgtgccaccaacgcttggctaatttctgtatttttagtagagacaaggttttgctgggttggccaggctggtcttgaacttctgacctcaagtgatccgcccacctcggcctcccaaagtgcttggattataggcgtgagccaccatgcctggcctttttttttttttttttttttttgagatagagtcttgctctgtcgcccaggctggagtgcagtggcgtgatcttggctctctgcaacctctgtcccctgggttcaagtgattctcctgcctcagcctcctgagtacctgggattacaagcacctgacaccacacccggctaatttttgtatttttttttagtagagacagagtttcacctattggcctggctggtctcaaactcctgacctcagatgatctgcccttcttggcctccgaaagtgctggcattacaggtgtgagctaccatgcccagccctgacccactgtatcttagcagagtaggtggtttaccctctcctctccatgccttttgctttttttttttttttagatggagtctcgctctgtcgcccaggctggcgtgcagtggcgtgatctcggctcactgcaacctccgtctcccgggttcaagtaattctcctgcctcagcctcctgaatagctgtgattacaggcgtgcaccaccacagccagctaatttttgtatttttagtagagatggggtttcaccatgttggccaggctggtgtcaaactcctgacctcgtgatccgaccgcctcagcctcccaaagtgctgggattacaagcatgagccaccacgcccttcccataccttatcttttatcacttcaacctcttcaattcctttttactatgaatttctatttgtcataatttacttgcttcatcaggcagggacaatgtcagtacaaaaaaaagcatttccagtacctagcacaatgctaagtactcaataaatattagtcttttttcaagttttgctcttgttgcccaggctagagtgcagtggtgtgatctcagctcaccgcaacctccacctcctgtgttcaagcgattctcctgcctcagcctcctgagtagctgggattacaggcatgtgccaccacgccggctaattttgtattttttagtagagacagcgtttctccatgttggccaggctggtctcgaactcctgacttccggtgatccgcccaccttggcctcccaaagtgctgggattacaggcgtgagccactgtgcccagcctttttgtttgtttgttttttgagatggtgtcttgcgctgtcgcccaggctggagtgcagtggcgcggcgcgatctctgctcactgcaagctccgcctcccaggttcacgccattctcctgcctcggcctcctgaatagctgggattataggtgtgcaccaccacggccggctaatttttgtatttttagcagagacggggtttcactgtgttagccaggatggtcttgatctcctgacctcatgatccgcccgcctcagcctcccaaagtgctgggattacaggcgtgagccaccgcgtccagccgtgtttgttttttgagacagagtctcgttctattgctcaggctggagtgcagtggtacgatctcagctcactgcaacctgtgcctcccaggttcaagcaattcttgtgcctcagtcttctgcgtagctggaattacaggggcatgtcactacacccagctagtttttgtatttttagcagagacaaggttttgccgtgttggtcaggctggtctcgaactcctggccgcaagtgatctgcccgcctcggcctcccaaagtgctgggattacaggtgtgagccactgtgcccggccaaaattagccaaattcttgaaagaatgaatgaggaaagggagctattgcatccacaacctcagggtttcaagaaacatcctaattatgttctttaaatcaaatcaacttaaatcctacttcaagcctttatttcaccagaccaataggaaatccagtctcagtcatatttgggtttccctcgttgatatggttccgatgtcctgcccaaatctcatgttgaaatgtaatccccagtgtcagaggtggggcctggtgggaggtgattggatcatgggggtggatttctcatgaatggtttagcagcagcatcttagtactattctcgcaatagtgagtgagttctcatgggatctggtcatttaaaagtgtgtagcccctctgcccctgcctactgctcctgctctggccatgtgacctgtctgctccccccacttctgcttctgccatcattggaagtttcctgaggcctccccagaagcagatgccgttatgcttcctgtacagcctgacgaagtgtgagccaatgaaacctctttttataaatgacccagtctccggtatttctttacagcaatgtgagaacagactaatacactcaccttctatagccactaagaggcttaaatggtgccaaggacgtaggagaaggacagtccatcatggtctttgactaagcccctgaggtttcttgtagtctggcagatctctgtttctgtgcaatgcctgggatccaggaatttttgccaaggtgagggtggtacccaccttgagtaccccagagccaagaatctagtctccctcagtattccacttggccactccccactgagcaccagccatttccctggagtgctgccagtgtgtaagtgtggggaccctactcttaaccaaatgttttctccccttttcttttttttcttttttctttcctttttttttttgagacagtttcactcctgttgcccaggctggagtgcaatggtgtgatctcggctcactgcaacctctgcctcccaggttcacgcgattctcctgcctcagcctcccgagtagctgggattacaggtgcccaccaccatgcccggctaattttttgtatttttagtagagatgggtttcaccatcatggccaggctgatcttgaactcctaagctcgtgatccacccgcctcggcctcccaaagtgccgggattacaggcatgagccaccgcacccggcctcctcctttttatttttatgtagttatttattttttgatacatcgagtcttactgtgtcactcaggctggagtgcagtggtgaaatctcagctcactgcaacctctgcctcctgggttcaagcagttctcctgcttcagcctcacaagtagctgggactataggcgcacatcaccacacccagctaatttttgtacttttagtagagatgaggtgtcaccatgatggccaggctggtgagctcctggccacaagtgatccacctgcctcagtgcttcttctaaagtgctggggttacaggcatgagccacctcacctggtcctcttcctcctttttaaactgaagtggtcaaggcagcttgcttctgcagtgttcaacatggccagagaaaagcctcttccatgttccattactttattctccaagttcttcttttttttttcttatggacagaaagaaaagactcaaactcatttggcttcattaataaacgtcttctaaactgcacacaccatagggagagtgaaggggctattagtcatttctggaagcagagtctaagactgggaaaagtattaaattagaagtcacaagatactcattttagcaccaccacttagtcaacaaacttggacagttcatttcaccatcttctttttttttttttttttttttgagatagagtcttgttctgtcacccaggctggagtacagtggtgcgatctcggctcactgcaacctctgcctcccaggttcaagtagctgaaattacatgcatgcgcctccactcccaggtaattttttgtgtttttagtagagacagggttttgctatgttggccgggctggcctcaaactcctgaactcaagagatccacctgcctcggcctcccaaagtgctgagataacaagcgtgagccaccgcgcccagcccacttcaccatcttcaaaataaggctaactaaaccattcttatgtagctcaggggactgttgtgataatcaaaggagatgacttgctagcagttgttttctatgtggtgttaattgccataagtatacatcgattttttaaattatttttattatactttaagttctagggaaatgtgcacaacgtgcaggtttgttacatagatatacatgtgccatgttggtttgctgcacccatcaattcatttacattaggtatttctcctaatgctatccctcccccagccccccaccccacgacaggccctggtgtgtgatgttccccgccctgtgtccaagtgttctcattgttcaattcccatctgtgagtgagaacatgcggtgtctggttttctgtccttgtgatagtttgctgagaatgatggtttccagcttcatccatgtccctgtaaaggacatgaactcatccttttttataatgttttgtttttatatggcttactgattcatttaatcagattactttcttaacatagcaaagcatgtgtggagaagacactgctgtgtgtagccaacatgacaagtctgccaggtacataaggagtctggtaccaattagaggaagccaacaggtcacagtgctttggtgtacggatgggagcgtgtgtcaggagatccaaagcaaacaggggaaggagttgggtagcaaaggtataatggggccattcaattttggagcatggggagattgccccggccagaaagagcagggccatttctagtagaaacaaaggaactgggcgtggtggctcacgcctgtaatcctagcactttgggaggccgaggcaagtggatcccctgaagtcaggagttcaagaccagcctggccaacatggtgacaccctcatctctactaaaaatacaaaaattagccaggcattgtggtggcatgcgcctgtaatcccagctactagggaggctggggcaggagaatggcttgaacccaggaggcagaggttgcagtgagccaagatcgtgccattgcattccagcctgggcgacaagagtgagactgtgtctcaaaaaaaatacaaaaaacaaaaaacaaaaaaagggacaagccttgaaaaagcagaggtcaggtctacaaggtctaggtaacaagagtggcagaatcttaggcccagaggaaatggttcatgagagccaacctcgagcacagggttgtgaatctacagctgaggatccaggtggaaggacttggcagagatcaaacgccaggcacagaaggactgctcagaataggtaaccggccgggtgaggtggctcactcctgtaatcccagcactttgggagatcaaggcagatagatcacctgaggtcaggatttcgagaccagcctggccaacatggtgaaaccctgttctgttaaaaatacaaaaaattagctgggcgtggtggtgcacgcctgtagtcccagctacagggaggctgaggaagaactgcttgaacctgggaggtggaagttgcagtgagccaagattctgcctgggcaacagagtgagaccctttctcaaaaaacaaaaaaacaaaaaaacaggcaacaaccactatttctgtactatgttccacactttccacgcataatcacatgtctttaaggaaatttttttgagacagggtcttgctctgttgcccaggctggagtgtagtggagcgatcaaggctcactgcagcctcaatctactgggctcaagtgtttcttctgcctcaacccacctgagtagtggagactacaggcgtgcagcaccacatccaactaattgttttgatttttaatagagatgggatctcacaatgttgcccaggctggtctcaaactctggagctcaagcagtcctcttgcctcagcctcctaaagttctgggattacaggcgtgaaccgccgttcccgacctcagtattgacgacggccctgtgaaaaggggaaaccaagaggtgcagagatattaagtgatttgcttgtagtcactctgctgcgtggctgagcttggttttgaatccaggactgctaacttcaataccaatggaaatgggtatcagaaacgaggagggagggtgagctgggaggtgctgagggaagaagaaactggcaaagtggggctcaatcctaccatcgtttttgaaaggggctcatggaggggacccttgttcacacatgagcaggactgagtcttgcaggcagggatcctgcgaaaccagacagttccggacacaagggaactattgagaacaaatcccaattcacataatcatttcggcacctttccagcaatgcttgagaagtctgctgctgggaaaacctggaaaatgctagtaaggctgaaaatatctataagcaaagacaattttgcaagatgagtaggtaacaacatgggaaagtgcttatgacataatgtcagggaagaaggacagatgatggctcttttgtacaaaacgcgtagagagaaacgtaggaaaaggaccagggattgtcaggttgtgggacaggatctttttacagtgatttcccaaaatttctataatgtgttacacttttaaaattataatcatggagactgtaaaaacagaaataatgctttgtttttttaaactgatgtttattttccctcaaccttatttccatttcctgtttaaaagcctgtggaagaacagcttaagagcactttttttttttttgagacggaatctcactctgtcgcccaggctgaagtgcagtggtacaatcttggctcactgtaacctctgtctactgggttcaagtgattctcctgcctcagcctcccaagtagcagggactacaagcgtgcaccaccatgtccagctaatttttatatatatgcatatatattttttgagatggagtctcgctctgtcgcccaggctgaagtgcagtggcacaatctcggctcactgcaagctctgcctcctgggttcacgccattctcctgcctcagcctcccgagtagctgggactacctacaggctcccgccaccacgcccggctaattttttgtatttttagtagagacagcgtttcactgtgttagccaggatggtctcgatctcctgacctcgtgatccgcccgcctctgcctcccaaagtgctgggattacaggcgtgagccaccgcgcctggcctaatttttgtatttttagtagagatggggtttcaccattttggtctttttttttcttcttttttttgagacagggtctcgctctgtcacccaggctggagtgcagtagtgaaattatgcctcactgcagccttgacctcctgggcgcaagtgatcctcccacctcagccccccaagtagctgggaccacaggctggcaccaccacacccggctaatttttgtgttttttgtagagatggggttttgccaggttgctcaggctggttttgaactcctgggttcaagcgacctgttcacctcgacctcccaaaatagtaggattacaggcatgagccgctgcacctggtctagacccatcttcagtggcagtctgagtgctgtgttcttcagtagggacctacttaacagggacagagagcacctgcacaccttcagacaagtctgcaacctcggatggcagttcatttgctcttaaggtccttcttggtcactgcctttcagcagtgacctgttctttttcagtattgtcaacccaaaatatctgagacaggtctcagtcaacttagaaagtttgtttgtttttgtttttttttttttttttgagacagtctcactctgttgctcaggctggagtgcagtggtgcaatcttgtctcactgtagactctgcctccaggtttccagcaattctcctgcctcagcctcctgagtagctgggattacaggcgcccaccaaaacgcctggctaatttttgtatttttagtagagacagagtttcaccattttggccaggctggtcttgaactcctgacctcaggtgatctgcccacctcggcctcccaaagcgctagcattacaggcgtgagccaccgtgcctggcctagaaagtttattttgccaaagttaagaacatgctgtgacatagcctcaggaggtcctgatgacatgtaggtggtcggggtacagcttgcttttataaattttagggagacatgagacatcaatcaatacatgtaagatttacactggtttgatctggaagggtaggacaacgcaaagggtgggacaactcaaagggtgaggggtgctttcaggtaataagtagacttaaaaatgttctgattggcaattggttgaaagttattatcagtagaaaggaatgtctgggttagaataagaggttgtggacccctggacacctaggttatttcatacagatgaagcctccaagtagcaggctttagacagaatacagatatttcttatgagacttaaggtctgtgttggtgttaatgctggaagggtataaggagccatgtccaacccccctcttccatcatgacctgaactggattttcaggtaactctggaatgcccatggccaagaggacgggtccattcagatggttgggaggccttagaattttatttttggtttaaaatatcttttttttttttgaagaccaagtcttgctctgtcacccaggctggagggtagcgtcaccatctcggctcactgcaacctctgcctcctgttttcaagggattctcccacctcagcctccctagtagctgggactacaagtgcatgccaccacacctggctaatttttgtatttttggtagagatggggttttgccatgttagccaggctagtctcgaactcctgacctcaagtgatccacccgccttgacctcccaaagtgttgggattacaggcgtgagccactgtgcccagcctataatatctttagaatctctgcagaagtagagctcaggcatgagatcctatggtgatcacaggagatggtgttacacatgtacagaacttccctgccagcacccaccacagcagacccactcaggagctcctttctcgttgcttgggatggcagtgtccacgcagtgtcaaggagaatctttgtgaccaagagccatggtaggccggttaccatgaaacacttctgtgacaggctggtggtcagccccaggatcagtaaccatcagaagacgtggctcccaggccgggcgcggtggctcacgcctgtaatcccagcactttgggaggccgagatgggtggatcacgaggtcaggagatcgagaccaacctggctaacatggtgaaaccccgtctctactaaaaatacaaaaaattagccaggtgtggtggcgggtgcctgtagtcccacctactcgggaggctgaggcaggagaatggcgtgaacccgggaggtggagcttgcagtgagccgagatcgcgcccctgcactccagcctgggcaaccgagcgagactccatctcaaaaaaaaaaaaaaaagaagacgtggctcccagaaggctgtctggatctggttagtgaaggttccaagagtgaagtggccagcagtgagagcggcttcagtggcagcagcaaacttcagcacagcccgctggctagtattcctggagggtatgacacgggaaacagctgggttttcgaaggccacagtggcatgagtggccggcacaagcttctctcaggtcatctccagttgtttttatttgttgttttgtttttcttttgttgttttgagatagtctttctctgtcacccaggcaggagtacagtggtgcaaacatagctctctgcaacctcaaactcctgagctcaagtgattctcccacctcagactcccaagtagctaggatggatgagtgccaccatggctggctgatttaaaaatcgttttttgtagagatggagtcttgccatgtcacccaggttggtctcaaactcctgggctcaagctatactcctgcctcagcctcccaaagtgctgggattacaggcgtcagccacctcgcccagcccccttcagatttataaggtagatgccatcacttttccttttggagatgtcctgttccatttggaagtcaagattggtgccacctaagtgggtttcttccacaaggaatttgacaatatctttcttcttcatttgcaggatatcaagagtaccagacattgtaaaaatttccctttatgtgacaaaagaactcaggacaatgctgtagggacccctctctaaatagtgtagaaagctgaaaaaatgtttatgagtcagttgtgagtctgctctttcaagaagagcatataatagacaaatattttaactaagaacattgtgcagggctgggtgtggtggctcaggcctgaaatcccagcactttgggaggctgaggcaggaggatcacttaaaaccaggagttcaagaccagcctgggcaaaatagtgagaccccatctctaccaaaaaaaaaaaaaccaaaaacaaaaaaacactgtgcacagtgatgtatattcagtgactggtacatagtagatgttcaatatctaaataaggaaataataagagactgggcatggtgcctcatgcctgtaatcccagcactttgggaggccgaggcgggaggatcacctaaggtcaggagttcgagaccagcctggccaacatggtgaaaacccatctctactaaaaatacaaaaattagctgggtgtggtggtgggcccctgtaatcccagctactcgggaggctgaggcaggagaatcacttgaacctgagaggtggagattgcagtgagctgagattgcaccattgcactccagcctgggcaatgagggtggaactccatctcaaaaaaaaaaaaaaaaaaagagtgattgtgcaaccattgtactaaggtggttgggttaggatgagatgttttcttcatccaaaattaaatttgctgtaatgttacactggctttcaaaaccataaagaaaccacaacactttactaaaggcctatttgctaggattctttacgcattagactgtgaaacaaaattcttagctgaggctgggtgcagtggctcatgcctataatcccagcactttgggaggtcaagggaggtggatcacttgaggtctggagttcaagaccagcctggccaacatggcgaaaccccatctctactaaaaatacaaaagtggccgggtgcggtggctcatgcctgtaatcccagcactttggaaggccgaagcgggtggatcacctgaggtcgggagttcgagaccagcctgaccaacatggagaaatcccatctctactaaaaatacaaaattagctgagcgtagtggcacatgcctgtaatcccagctacccaggaggctgaggcaggagaatcgcttgaacccggaaggcagaggttgcggtgagccgagattgcaccattgcactccagcctgggcaacaagagcaaaactccgtctccaaaaaaaaacaaaatacaaaaatagccgggtgtggtggggcacacctgtaatcccagctacttgggaggctgaggcaggagaaatgcttgaacccaggaggcagaggttgcagtgagccaagatggcgctactatactccagcctgggcagcagagtgagactctgtcttaaaaaaaaaaaaaaaaagggggggccgggtgcggtggctcacgcctgtaatcccagcactttgggagaccgaggcgggcagatcacgaggtcaggagatcgggaccatcccagctaaaacggtgaaaccccgtctctactaaaaatacaaaaaattagccgggcgtagtggcgggcgcctgtagtcccagctacttgggaggctgaggcaggagaatggcgtgaacccgggaggcggagcctgcagtgagccgagatcccgccactgcactccagcctgggcgacagagcgagactccgtctcaaaaaaaataaaataaaataaatgcttttctgtgactttgccacctttccctctccggaagagccattagcgccccctgctgcctgagccggcgcactccactctgccctagtggagaggggccgggtgatgggggcggcaataatgggagcggccccctgggctagagcggtgcctccaacccctgatcctcctcatcacaacccatttgtcagggccagggccagggactcggccagatacagggagacaaccccacaggaacatcagggaaggtgatgcagtcgagacttgctggtgtcctgtcccagaccatgatgacgtccatctgtgctgctgccaagttaaaccagagtgttctggttaacctggatttgaccttggagttctggcctctgatttgccttccctaggactccatgtgctcactctgcgtacagatattcttgatgcatttgctagtctgattttggacttcaaatgtcttggtgttttttgtttgcttttttcttttttccagacagattctcattctgtcgcccaggctggagtacagaggtgtgatcttagctcactgcaacctctgcctccccggttcaagcaattatcctgcctcagcctcccaagtgctgggaccacaggcacatgccaccatagctggctaattctttgtattttttgtagagatggggttttgtcatgttgcccaggttggtctcgaactcctgagctcaagcaatctgcctgcctcagcctcccaaagtgttgggattataggtgtgagccaccacacctggcctttatttatatttatttaattacatttaaaaattttaaagaattgatgctacaattcacaaatttcttcttcgtcagggaaacctcagttctgaagacttttctactggctgaatgaggtccatccagattattatttttgggggaaagggagtagcacagggtctcactctgtcacccaggctggagtgcagtggcgccatctcagctcacttcaacctctgcctcccaggctcaagtgattctcccacctcagcctcccaagtagctgggactacaggcacacaccaccacacccggctaatttttgtatttttttttggtagagatgggagtgtgccatgttgcccaagttggtctcaaactcctgggctcaagcgatcctcctgccttggcctcccaaagtgctgggattataggtgtgacccacctcgccctgcctccacccagattattgaggataatttcctttacttaaactcaattgatagtagatgctaatcacatctacaaaataccttctaggccagacacagtggctcacgcctgtaatcccagcactttgggaggtgggtggatcacctgaggtcaggagttcgagaccagcctggccaacatagtgaaacaccgtctctactaaaaataaaaaattagctggatgtggtggcatgcacctgtagtctcagctactcgggagactgaggcaggagaatcacttgaacccaggaggcagaggttgcagtgatcacaccactgtactccagcctgggcgacagagtgagactctgtctcaaaaaaaaaaaaaaaaaaaaaaaaaaaaaacaaacttctagcaacacctagattagttttgactgaataatgaggtactatagcatcgccaacatggcagagggcactgggcactacccatgttgatgaacagaaggccaaagcagcactccattctcaggcaaactcaatgggctgaagccatgctatcttccctggtgtgttctcatagaagcaggaagcaaggccactctcccgactttaccaacatccttttccacatggacaaagtgaaagggaaaatcattgcttctgggcctatatcttataaagttcaaattgaaaacagctctagtcaaatgcagtggctcacgcctataatcccagcactttgggaggccaaggcaggaggattgcttatgccaggagtttgagaccagcctgggcaacatatcaagaccctgtttctataaaaaaattcaaacattagtgaggtggggtggtgcaagcctgtagtcccagctatttagggggctaaggcaggaggatcacttgacaccagaaggtggaggctgcagtgagctccgatcataccactatactgcagcctgggcaacagagtgagacctgtctctaaaaaacgttatatatgtaaaaagaagaaagctttctagattttattcatatttagcctagggactgagacagctcaggccagggacattgtgttccagatggctgggttagaaactagaccagtaggccaggcatggtggctcacacctgtaatcccagcactttgggaggccaaggtgggtggatcacttcaggtcaggagttcgagactagcctgccaacatggtgaaaccctgtctctactaaaaatacaaaaattagccagccatggtggccagcgcctgtaatcccagctattcaggaggctgaggcaggataattacttgaacccgggaggcagaggttgcagtgagccgagatcgtgctactgcactccagcctgggtaacaaagcaagactccatctcaaaaaaaaaagaaaagaaaatgaaacggctgggcgcggtggctcacgcctgtaatcccagcactttgggaggctgaggccggtggatcacgaggtccggaaatcgagaccatcctggctaacacggtgaaactccatctctactaaaaatacaaaaacttagccgggcgtggcggcgggcgcctgtggttccagctactcgggaggctgaggcaggagaacggcgtgaacccggtaggcggagcttgcagtgagtcgcgatcacgccactgcactccagcctgggcgacagagccagactccgtctcaaaaaaaaaaaaaaagaaaaagaaactagactggtaagagggacaggcaccacccctatactccatcacctggggcttattattgtgccaaatttgtctgcctgaagccgtcttcccttaggatgcattatttcccaggggcttacacccataatcctagcacttggggaggatgaagagggtgatcacttgaggccaggagttcgagaccagcctgggcaacacagtgagacgccccccatctctacaaaaaaaatacagaaaattagctgggcatggtggtggtatacacctatagtcccagctacttggaaggctgaagttgaaggataggctgagcctgggagattgaggctgccagtgagctgtcattgcacctctgcactccaaccttggcaacagagtgagaccttggctcaaagtaaataaataaagatgtataattaagagcttgtgaacagatacatctctcacatataattatttgtttttctgaaaggaagtccaagaaactgtttgcctttaaaaaaagggaaaggtcgtatggacaaaagattttacttttcttttttttctttcttttttttgtttttagacagagtcttgctctgtctccaggctggaatgcagtggcgcgatctcagctcactgcaacctccagctctgtgattcaagcaattctcctgcctcagcttcccaagtagctgggattacaggcatgctccaccatgcccagctaatttttgtatttttagtagagacggggtttcaccatgttggccaggatggtcttgatctcctgacctcgtgatccgcctgcctcgacctcccaaagtgctgggattaaaggcatgagccatcatgcccggccaagattttttcacttagcttttatttgtaattttggatttccaaatctatctatctataaatatatatatataaaaatatatatataattttgtcgagtatcaaccaagatgccctaacacaatttaacgtagtttaattaatttcacatatctaactcactttattttacttatttatctgtttctgtgactgtccctctgtcatccaggctggagtgcagtggcgtgatctcggctcactgcaacctccacctcctaggttcgagcaattctcctgcctcagacttccagatagctgggattacaggtacaccccaccatgcccggctaattttttttattatttttggtagataccaggtttcaccatgttggccaagctggtcttaagtgatccattctcattggcctcccaaagtgctgggattacaggcgtgagccaccatgtccagcccacttaactcactttaatttagtacttaactatatttgaaatgcttgtgataactctccatgaaggaaaagtaagatatgtaagaattgggaggaaaaaagtacatatatcacttttggcagtcaatatatttatattctggaaaatcaagctaaaaataacttgagtttgccatgggattagcaagatttcaggttgtaagagtcaactgaattaatacaaactagactgagcatggtgactcatgcctataaccccagcactttgggaagctgaggctttttttttttttttttttttgaggcggagtctcgctctatcacccatgctggagtgcagtggcgtgatctcagctgactacaacctctgcctcctgggttcaagcaactctcctgcctcagcctcctgagtagctgggatacagatgcatgacaccatacctggctaattttttttttttgagttggaaattcgctcttgttgcccaggctggagtgcaatggcgtgatctcggctcgctgcaacctctgcctcccaggttcaagtgattctcctgccttggcctcccaagtagctgggattacaggcatgcaccactgcatctggctaattttgtacttttagtagagatggggtttctccatgttggccaggctggtctccaactcgacctcgtaatccacccccctcggcctcccaaagtgctgggattacaggcatgagccactgcacctggcctatatatatattttactactatatgtatatgtatatatgtgtatatatagcatatatatgtatatatgtgtatatatagcatatatatgtatatatactagtaacagtatatatatacacattttcactacactagtcaaagtatacacacacacacacttagcagtatatattatatatatattccagtatatatatctacatgtaaaagatatatagatatatatatagatacataaaatatatatggatacatacactggaaaagtcagtgaggagaaaacgattcattgacaatactaaataaaaaccaaaccaaccaggaaacatttaggaactagcttcacttttgacatgtaaccagaacaacacagtaaaggttgttgcctgggaattagaagtgaaacaccacgcccaaatggctcaagctggtggccagagataagaacttaaaggcatctctcccgcctagcagactgggccccctggtttcccatcacttcctttaaacagactactcaggcatttgcccacaaacttaaaggggctttaagttcaactttaagtgacaccctatttgttgcaggtggtaaacgattttaccaagacagctgtaggtaaagaaaggcagatttaaccactcttcctctttccctaagcggcctgaggtaatctgtgaaaatggttcgctattcatttgacctagagaaccccacaaaatcacgcaaatcaagaggttcaaatcttcgtgttcactttaagaacactcatgaaactgcaggccatcaagcgtatgcatatacaaaaagccacaaagtatctgaaagatgtcactttacagaaacagtgcgtaccattccaatgttacaatggtggagttggcaggggtgcccaggccaagcattggggctgggcacaaggtcggtggcccaaaaagagtgctgactttttgctgcacatgcttaaaaatgcagaatttaagggtttagatatagattctctggtcattgagcatatccaagtgaacaaagcacctaagaagggctgctggacctacagagctcatggttggattaacccatgcatgagctctccctgccacactgagattatccttactgaaaaggaacagattgttcctaaaccagaagacgaggttgcccagaagaaaaagatatcccagaagaaactgaagaaacaaaaactgatgacacaggactacattcagcattaaaataaatgcaattaaaagttaaaaaaaaaaaaggcagatttattagagaaagcgtgaaaatatgttgcaagggtgcgatgggcagcacagtagagaaggggctgtcagccaaggggcaggggctagggggaggttttatagggtcttgcaggaggggggctacatgcagaacaaggttgtaatcctggcgctacatgccaaacaggtcattgtgcccacaagtttgtgattagcactttctcagaacaagtgttcgtttttctcccccacctgagaccctgtcctcatttcgcttacttatcaggactccacactattctcttatacgtaccactagttgcttctctcactctctgcctcttaatttctgccttgcctgacctgaggatggaggatgatactcctgactcatggcgccttccctgcccaggatctgtaagtaataaacctttgatcatatttcctactgtggtggattgaatgggtgcctttcatctgaagaaccaggggctacctaggttttccagggacactgggaagaacacaaggctgggctctcagcatcaaagcgatggttagacaatcataaactgaacacagaccagacaacagccatgggagcgtctgccaggataaacacatttcccatgtgaaggagcccctgggcacaggttgggcagctaagcattagaccttccaccacgttaaagaagtaccccatgagagacgcactgtagacacctatgcccagctcccttcatttcccattagggcagggctgctagctgctctggtactgaaaccccagtttagctaggggctctcaaaacagacatataagagccattcaataaaaataaatgtttcttggctgggtgcagagactcacgcctgtaatatcagcactttgagaggccaagatgggcagatcatgtgaggccaggagtttgagaccagcctggccaacatggtgaaaccctgtctctactaaaaatccaaaaattagctgggcgtggtggcgcatgcctgtaatctcagctactcaggagactgaggcatgagaatcgcttggacccggggaggcagaggttgcagtgagccaagatggccccactgcactccagcctgggcaacagatcaagactctgtctcaataaaaaagagagagaagaaatgtttctcaaaagaggaataacatagccattctaaaacaatactgacttggaagactggtgtgtgattgagaccttaattcttgaaataatatagggccacattgttttcatcctttttaattgattgattaattaattgtttttctgagacagagtgtctgtcgccagggctagagtgcagtggcgcgatctcagctcactgcaacctccacctgctggtttcaagcgattctcctgcctcagtctcccgagtagctgggattacaggtgcctgccactatgcccagctaatttttttgtatttttagtagagacggggtttcgccatgttggccaggctggtctcgaactcctgacctcatgattcacctgcctcagcctcccaaagtgctgggattacaaatgtgagccaccatgcctgccgttttcacacctttcttaaagtggcagtagctttcttcatgtgaagttctttctattcagaggctttatatataggacagatactattctatatataaaaagtacaattgcttttgcgcaaattaaaagaaaatggtatatatacataaacacatttgttgatatatgacaggaaagtttctggagggatacataagccattgttagttttattttatacctttgtgtactgtttaaattattttacccttagtatgccagaaaaagtcatcactgttgatcatctggggccaatagaaccttcaaattttaaaaatatttcctgtaaagcaatttacaatagtaggaataagggatagtgaaaaacaactttattagaaactttaacaagaatgctttatctcactactgggtcagtatataaacatggtgttatttttcctatgttaaaacctctctcttgatccatcccacaagcccctcctatttctgcccccatttctctgcttttatttttatttatttatttatttattttgtgagaggggttcttgctctgtcacccaggctggagtgcagtggtgtgatcatagcttgctacaatctccatgtcctcagtttaagtgatcctcccacttcagcctcccaaataggtgggactacaagtgcatgccaccgcatgcttgggtaatttaaaaaaaaaaagtaggctgggcactcatccctgtaatcccagcactttgggagcccaaggcgggcagatctcttgagttcaggagttcgagaacaggctggccaacatggtgaaaccccacctttactaaaagtataaaaatcagccaggcatggtgggacacaactgtaatctcagctacttgggaggctgaggcacgaggcggaggttgcagtgagcccagattgcgccactgcactccagcctgggcaacagagtgagactccatctaaaaaaaaaaaaaaaaattatagagatagggtctcactatgtttcccaggctggtctgttactcctgaactcatgggaccctccaccttgtactctcaatctctgctcctcttgagaacaaaatcccttgagagaattgtcaatactccctctttcaatttgtctccctcattctctcctaaaccccctgtaattaggctttgtgttcccaccactcttctgaaactgcccttgttccagttgccaaggactttcatgttgctgatccaatggtcgtctcagtctttacttgtcttgaactgttggtggtatttgacatggtcgatcattttctccacctattttcttcatttggctcctccaattctatttcttgctagttttcctcctaccttgctggcccctcattgtcagtttctttggctggtttctcttcatctcccaaacagtgaatgttgaagagtgctggggtgtggtcctcgaacctctcctccatctatagtcacttgcttgtgatctcatgcagtttcttgggtttaaatattatctaggtggtaactctcaaacttaattttccaacctggatcatatcatccccactggattccaggtttgtatacccagctgccctcttgaacatcttttttttttttttttttttttttttttttttgagataaggtctggctctgtcactcaggctggagtacagtggtgcaattacagctcactgcaacctctgcctcctgggctcaacctccacctcccacctcagcctcttgagtaggtgggattacaaacatgtaccactatgcctggataatttttgtatttttttggtagagatggggggtctcaccttattgcccaggctgctttttaactcctgggatccagtgatttttttcacctcagtctgccaaagtgctgggattacaggcatgagccactgcacctgtcctgaatatctactaggtgtctcaagcctaacaagtctacaattaaactctgatcttccccaacttgttcctcccttagtcttccctgcatcagctaatgacaattctccttccagttgctcaggctaaaactctggagtcatccttaatgactcttttgcacatgctctgcattttgtccgcctgcaaattccatcatctctatcttcaaaatatccagaatctgactccattttgctgcttccactgctagcctccaggcccacgatgctggccactatttttcacttggaaaattgcagtagcctcttttattcccccttttttaaaaaactttttatttttattattatttttttgagacagagtcttgctctgttaccccaggctgtagtacaatggcatgatcttggcttactgtaacctccgcctcccaggttcaagcaattctcatgcctcagccacccaagttgctgggattacaggtgcctgctaccatgcctggcctaatttttatatttttagtagagatggggtttcaccatgttggccgggccagtcttgaactcctgacctcaaatgatctgcccgccttggcctcccgaagctccgggattacagatgttactcaccacacccagcctctacgtacattagctcctttaatcctcatttaaaaattcttgtggtagatatgaagagtcttcaaaaaattcactaaaaacgcacataatgaatgaaaatactatgcatggatttcaaacattttttgtaccaaaataaacgcatactaatttgtcataacctttcacatcaagatctggtttgaggcactaaggataagacattgtttgaaaagagcccctgtcagagcaacatgaattctgctaaaaaaaacacttttttttttttttaaatagggccttactctgttgcccaggctggagtacagtggcatgatcacatctcactgcagccttgacctcctccgctcaagtaatcctcccacctcagcctcccaagtagctggggctacaggcgtgcaccaccacacctgactaatttttttgggagaaggggggatggaatttcactctcattgcccaggctggagtgcgatggcacgatctcggcgcactgcaacctctgcctcccaggttcaagtgattctcctatttcaggctcctaagtagctgggattacaggtgcgtgacaccaggcctggctaatttttgtattgttagttgagatggggtttcaccatgttggtcaggctggtttcaaactcctgacctcaggtgatccacccacctcagcctcccaaagtgctgggattacaggtgtgagccaccatgcctggccaacaccacagtttctttatccacttgttgactgatggatatttgggctggttccacatttttgcagttgtgaattatgctgctataaacatgcgtgtgcaagcatctttttcatataacgacttattttcctctgggtagatacccagtagtgggattgtggaatcaaatggtagatctacttttagttctttaaagaattgccacactgttttccatagcagttgtactagcttacattcccaccagcagtgtagaagtgttcccttttcactgcatccatgccaacatctattatttttaaattttttgattatggccattcttgaggagtaaggtggtatcacattctggttttgatttgcattcccctgatcattagtgatgttgagcattttttcatatgttcgttggccatttgtatatcttcttcttcttttttttttttttttgtttgagacagagtctcgctctgtcgcccaggctgaagtgtaatggtacgatctccattcactgcaacctccgcctcccgggttcaagcaattctcctgcctcagcctcctgagtagctgggattagaggcgcccgccaccacgcctagctaatttttgtatttttagtagagacgggatttcaccatgttggtcaggctggtcttgaacccctgaccttgtgatccacccacctcggcctcccaaagtgctgggattacaggcgtgagccaccgcgcctggctgtatatcttcttttcagaattgtctattcatgtccttagcccacttttggatgatgggattgcttttttggcaacagtttttgatgctcaagacattttgctgttgactttctggagagccaaagaacaataacatctgcttattaggagagtgttttaaggaagttagtcgaagcttctgcagaaaaatgccagcaaagttttactggagagttcttctccaccacagcaatgcttctgctcatttctctcatcagacaaaggcaattttacaagaatttcaatgagaaatcattaggaatgcaccttttttattgttttattttttttttgagatggagtctcactttgtcacccaggctggagtgcagtggtgcgatctcggctcactgcaatctccgtctcccaggttcaagtggttctcctacctcagcctcccgagtagctgggattacaggcacctgccaccacgcccagctaatttttttttttttttttttttttttttttgtattttcagtagaaacggagtttcaccatgttggccaggctggtcctgaactccttacctcaggtgatccgcccgcctcggcctcccatagtgttgggattacaggcatgagccactgcgcctggcctagaatgcaacttacagtcctgatttggctccttctgacttcttttttttttttttttttttttgagatggagtctcgctctgtcgcccaggctggagtgcagtggcatgattttggctcactgcaagctctgcctcccgggttcaggccattctcctgcctcagcctccccagtagctgggactacaggtgcccaccaccacgcccggctaatttttttgtatttttagtagagacggggtttcactgtgttagcgaggatggtctcgatctcctgacctcgtgatcctcccgccccagcctcccaaagtgctgggattacaggcgtgagccaccaagcctggccatgctccttctaacttctttttgtttcctaatcttttttttttttttgagacagagtttcgctttgtcacccagactggagtgcagtggtgcgatctcagctcacagcaaactctgcctcccgggctcaagatattctcctacatcagcctctcaagtacctgggactacaggtgtgcaccaccacacctggctaattctgtatttttagtagatacagggtttcaccatattggccaggttggtttcacactcctgacctcaagtgatccacctgcctcggcctcccaaagtgtggggattacaggtgtgagccaccacgcccagcctgtttcctagtcttaaaaaaaaatttaaagggcatccatttttcttcagctaataatgtaaaaaaggctgcattgactgctggttgtggtggctcgcgcctgtaattccagcactttgggaggccaaggcaggtggatcacctgaggtcaggagtttgaaacgaaccttgccaacatggtgaaaccccatctgtactaaaaatacaaaaaattagccgggcatggtggtgcgtgcttgtaatcccagctacttgagaggctgaggcagaagaatcgcttgagcccaggaggcggaggttgtagtgagctgagatcacaccgttgcactccagtctgggtgacagagtgagactctgcctcaaaaaaaaaaaaaaaaaaaagactacattgacatggttaaattcccaggcctctcagttctttagggatagactaaagggctggtatcatcacttacaaaagggtctttttttttttttttttttttgagacgcagtttctctcttgttgcccaggctggagtgcagtggcgtgatctcggctcactgcaacctctgcctcccaggttcaagtgattctcctgccacaggctcccgagtagctgggattacaggcgtccgccaccacgcccagctaattttttgtatttttagtagagatggggtttcatcatgttggccaggctggtcttgaactcctgacctcaggtgatccaccaacctcggcctcccaaagtgctaggattacaggtgtgagccaccatgcccacccctacaaaagtgtcttgaacttgatggggattatgttgaaaaataaggtttatgtttttttttaatttttaatttttaattccatttcccacaaacttttcaaagtcttctcatattatctgccttttggagatgagaaactaaggcacaggtggttaaggatgttgctcaaggttacacagctagtaaaatgcagaccagattttggacccaggaaatctggcttcagagcctctgtgctcaacctatgtgctgtactaactcttgtgatgagaaggaaatatcagttgggcacggtgtctcatgcccgtaattccagcagtttgggaggccgaggtgggaggatctcttgagcccaggagttcaagaccagccttagcaatatagtgagacgctgtctctacacaaaatcaaaaactgaggcaggaggattgcttgagcccaggagatagaggctgcaatgagccatgatcatgctactgcactcccacctcggtgacagggcaagaccttgcttcaaaaaaaaaaaagaagtaaatatctgttgaaaaaataaagacattgctgctacaaccaaccatcaacacagcctttgtgcacatttctatgtgatgaattgtagccaatatcagtttactcttcaacatatataaagaatgggaacaaataagactacttttatctagactaataaagtcaatatccttaactaatggttagaaaagataaccgaccccagttggctgcgatggctcacgcctgtaatcccagcactttgggacgttgaggcggctggatcgtgaggtcaggagatcgagaccatcctggctaatacggtgaaaccccgtctctactaaaaatacacagaaaattagctgggcgtggtggcgggcgcctgtagtcccaattactcgggaagctgaggcaggggaatggcgtgaacctgggaggcggagcttgcagtgagccgacatcacaccactgcactccagcctgggcgacagagcaagactctgtctcaaaaaaaagaaaagataaccgcccccctcaaaacaaacaaacaagcaaacaaataaaaaaccagagtataaactgtccattcaaaaaagactctagaggccgagatgggcatttcacctgaggccaggggtttgagaccagcctggccaccatggtgaaacccgggctctactaaaaacataaaaattagccaggcgtggtggcacacacctgtagttccagctacacagaaggttgaggcacaagaattgcttgaacccgagagggggaggctgcagtgagctatgattacaccactgcactccagcctgggtgacagaacgagactctgtatcaaaaacaaaaacaaaaacaaacaaacaaacaaaaaacccagcaatgttaaggtattgtgcttaaaaacataaattataaaaacaaaagctgggaaaataagttgccttaaaaaatggctgttattttagagagcagtttagaaatatgtttcacaaaatattaaatatttttatctcttgactcatgtattagtcagaactcctctggttgcaagtgacagaaatccaacatagactatgaaaaaaaaattaccttaaagaattaattgatcctgggctgggtgccatggttcatgtctgtaatcccagcattttgggaggctgaggtgggtggatcatttgaggtcaagagttcaagaccagactggccaacatggtgaagccccgtctctactaaaaataccaaaaaaaatcagctgggcggggtggtgcacacctgtagtcccaactactcgggaggctgagacaggagaatcgcttaagctccaaggcggaggttgcagtgagctgagattgcgccactgcacaactcctccttacagagggagactctgtgtaaaaaaataaaatgaataagaattgatcctggatccaggagctcaaagcatgtgcccaagaaactgaggttcttggctctccctgcctctgactttgtttccagcagtcatcctccctctctttgctggggaagacgccctgccagctccatggcaacaggagctgcatagctctagtcctcagaagtctccccgagtccacagccatccaacaatcccctcaaaagactctgaatagaggccaggtgtggtggcgcatgcctgtaatcccagcactttgggaggccaagccgggtgaatcacttgaggtcaggagttcaagatcagcctgactaacatggtgaaaccccatctctactaaaactacaaaaatcatccaggcttggtgatgagcacctgtaatcccagcaactcaggaggctgaggtaggagaattgcttgaacctgggaggtggaggttgcagtgagccaagattgtgctactgcaatccagcctgggcgacatgagactctgtctcaaaaaaaaaaaaaaaaaaaaaaaaaaaaagactctgatagagctgcctaggtcctatgcccattcctgagcaacctcatgttcaaggatgaagtactctaactggcaaagacaatgccatgtgtagaccagagggtttcatttcttcctggctcgggagaaactacattccccaggcactctcacatctggtggaagcatgtgactagttctgaacaatgaatgtggcacaagagaggcttacggcttctgagctggatcctaaaatgcaccccgtttcccccatcttccatgctctctctttgcttgttcatggtggatgcattctcaggtctaatcaagggctcctaggaagccctaaagaacactggaagcgataaaaggaaggagcttggatttctgcttaaaggaaagtcttctcatgtcctcccccaacaacctcccaaaaaaaccctcattgagctgtgatataaccaagaaataaacttattattctattgagccactgagatttgtagttagtggttatcaatctactgtgaatagattagttcacatgctcactcctgagataggagagatgggacttttgctttaaaacaaggcatactggacaggtgcggtggttcatgcctgtaatcccagcactttgggaggccaaggctggtggatcacttgaggctaggagttcgagactagcctggccaacgtgatgaaaccccatctctgctacaaatacaaaaaattagctgagcatgttggcatgcacctgtagtcccagctactcgggaggccgaggcaggagaatcccttgaggccaggaggtagaggctgcagagagctgagattgtgccactgcactccagcctgggcaacacagcaaaactccgtctcaaaaataaaacaaaaaggctgggcgcagtggctcatgcctgtaatcccagcactttgggaggccgaggcgggcggatcatgaggtcaggagatcgagaccatcctggctaacaaagtgaaaccccatctctactaaaaatacaaaaaaattagctgggcatggcagtgtgcgcctgtagtcccagctgctggggaggctgaggcaggagaatggggtgaacctgggaggcggcgcttgcagtgagccgagatcgtgccactgcactccagcctgggtgacagagcaagactctgtctcaaaaaaaaaccaaaataaataaaaaataaaaaataaggcacaccagagccataaagtgtaggaggggctgttcccaatggaaagacatgtgggtcagacaataaaagagcagataaacaacccacttatcttgagtttaggaatcagtccaaaggaaataatccaaaaggaaactaaattattttaaataaagatgttcatcgcagagctatttataatagcaacagattggaaatgtcccaaaagctcaaaacgtggatgtgataaagcaaagcacagttgatcagtataatgcacccatggatacatggaactgtgtatcagaaaccttgctgagtgacagatgctaagcacaaaaggatttagtcctctccttaccccttacaaaggcgctgggggttgggcctcctctggcagctgaattgaggagtggaatcctcagaactgggggcctgaatcagggagttctcattagatctggaggaggaaactgagccagaagttgttcagcaaactgggcttcacattcataagagacccaggaagagacatgggatcagggtttggaaccagggagagaagagaaaactttgatcaggtgaggatcaaattgggaggcagggagggtgcttgggctgtcagatgatgctcagggctggcttttgagggtggctgggctggctaagcaaaggaccagaactggggcaggaaccaaacccttctaagtcctcctctgggcagggcagggcagggcatcccttcactcacctggtgaaatgcctttttgtttgtttgtatgctttttgagatggtgtctcggtctgtcatccagagagagtgcaatggtgagatctgggctcactgcaacctctaccatctgggttcaagtgattctcctgcctcagcctccagagtagctgggatcacaggcgcatgccaccacactcagctaatttttttttttttttgagacggagttttgctcttgttgcccaggctggagtgcaatggcgcgatctgctcactgcaacctccgcctcccgggttcaagcaattctcctgcctcagccttcctgaatagctgggattagaggcatgtgccaccgcaccagaataattttgtatttttagtagagacggggtttctccatgttggtcaggctggtctcgaactcccagcctcagatgatctgcccgccttggcctcccaaagtgctgagattacaggagtgagccactgcgcccagccaatttttgtatttttaatagagacagggtttcaccatgtttgccaggctagtctcgaactcctgacctgaggtgagccatctgcctcaccctctcaaagtgctgggattacaggcgtgtgccactgtgcctggcctgaaatatctgttttgagacaggatctcactttgtcacccaggctggagtgcagtgatgcgatctcggctcactgcaacctccacctcccgggttcacatgattctcttgcctcagcctcccgagtagctgggattacaggtgcatgccatctcactaactttttattttttatttttgtagagacggggtttcaccatgttggccaggctggtcttgaactcctgatctcaagtgatctgcctgcttcagcctcccaaagtgctgggattacaggtatgagccaccgcacctggcctaaaagcttctcagatgattctgatctgcatcccttaggtgcaagcacttaaggtcctagccgtttgcttatacggtggttgatgatttagaaggtacaaggaatggaggccatggctgatgtgtcagtgtgttttagacacgggaatgtagtgaactctatgcaaattttgcagaataaaggcgggtggtgtcctgtgtttcccagtggtcaggaagcagagcgttctctagaacttaattgacgcatttcaccaggcaccaggtggaaaggtccagtacgggggatgaaacgtgacatcttaggatactccctcctgtaccatgatggtgtgatggtcacaggcatggagagggcccagagagggtatagtagcctttaggaccattgctgtctatccttatccagtgtacctataactcaagaactgatgaatttgggagacaatctctagaccacagggccaccaaaagttccatgggcccatgtttaggattttgaaggacgcccagtggcatactgagtagtgtcctccccagtcccagcactgatgcgcagtttcctactgccaggacattgatggctatactggtggaggaggaacctgtgcatttttcttatttttttattttttagatggagtctcactctgttgccaggctggagtgcagtggcgcgatcttggctcactgcaacctctgcctcccaggttcaagcaattctcttgcctcagcctcctgagtagctgggtctacaggtgcatgccaccatgcccagctaatttttgtatttttagtagggacagggtttcaccatgttggtcaggctggtctcgatctcttgacctcgtgatctgcctgccttggcctcccaaagtgctgggattacaggtgtgagccaccgcacccagccgatcctgtgcatttttttagctttgagcaggcttggatctcagccaactggatgatggccttgcagaactgtttagactcacagcaacagagccggcatgcctgcagagttcccaggccacggtgctttggatgcgggacttctctgccatcccctgccattgtggtcttgctggcaggatatctaccaaacagtttaggctgctcagctcacaaatacgggaagcaaactctttgaagactgcgaggaggcatgagctgaaccaagtgtgctccaagcactcctagctgtcaggtaatggggaatgccccccttgaaggccacttagatcactagcaatgctgtcttcttcaccatgaggtcactgacgttaatcatccagttttcttgctgtggagtcacaggagagtaagtcatttaggctgaagacttttttgtgtgtccttctcctgccagcttgagaaagctagggacttcttttttgttttttgaggcggactctcgctctgtcgcccaggctggagtgcagtggcgtgatctcagctcactgcaagctctgcctcccgggttcacgccattctcctgcctcagcctcccaagtagctgggactacaggcgctcgccaccacgcccggctaatttttgtacttttaatagagacagggtttcaccatgttagccaggatggtctcaatctcctgacctcgtgatccgcccgcctctgcctcccaaagtgctgggattacaggcgtgagccactgctccccggccaggctggggacttcttgatacaagctggatgagcttgccttgaggatatgaggctaggctgactttagggaagtcagtttttggaaagagttctcaatctctgaaacaaagcacacagtgaagctggtagcaaagaaatccatttttgtttgttttttttttagagacatcgtctcattctgtcacccgggctggaatacagtgcttgatcatagctcagtataaccctgaagtcctgggctcaagtgatcctcctccttcagcctccccagtagctgggaccacaggtgtgcaccaccacgtccagctaatttttttatttctatagaaacagggtctcgctgtgttgctcaggctggcctcaaactcctgggctcaagtgatcctcccgccttggcctcccaaagtgctgggattacaggcatgcgccattgcacccggcgaatcctagattctagaattgcttggggtaaggggtctcctaatccaggaacccagaccctttgctctgcttgagaacgcactgtctgaactgaacataacccacgtcagtccggctcacaaaactacacttatggggattggcctggaggtggcgcccctgttgttggtctagaaatgctggccagaggctcaggccagtctggcaaatggataagaacatcacccaatggaagaggatgtcacagctcagaaggctgggctgcacgctttatcagcccctggaagagagcaggggcactgcccaagcctgaaaacattgcacttccttaaactgctcaacacttatcttgacatctgtgggtttttttgtttgtttgttttttgtttttagatatgtctcactctgtcacccaggctggaatacagtggcacgatctctgttcactgcaacctccacctcctgggttcaatcgattctcctgtcttggcctcccaagtagctgggattacaggcatccaccaccatgcccggctaatttttgtatttttagtagagacggggtttcaccatgttggccaggctgggctcgaactcctgacctcaaatgatccacctgcctcggcctcccaaagtgctgggattacaggcgtgagccaccatgcccagccttgacatctgtttttaacttccattcccaggtccagagtgatctgggttttaaatattacaccttgatgtcttaataaaacttccaaatccagccttcccaaaaaattattccatgacacagcttaaacactcttctgatcaaaatgtactgagtgttttttagggcaaagatacatgtgacatctttggtgggttggtttgtttgaggcaggatctctgttaccaaggctggagtgcagtggtgcaatctaggctcactgcaacctctgcctcctgggcccgaaccatcctcccacctcagcttcccaagcaactgggactacaggtgcgtgcctggctaatttttgtattttttgtagagacgggattttaccatattgcccaggctggtctcgacctcctggtctcaagtgatccacccgccttggcctcccaaagagttgggcttacaggcatgagccaccacgcctggccacatctgatatctttaataaaaagactccaagcagggcgggcctgagatggaagaatcgcttgaacccgggagacagaggttgctgtgagccgagatcgcgccattgcaatctagcctgggtgacaagagcaaaactctgtctcaaaaaaaaaaaaaaaaaaagactgcaagcaggctagattgaagggctggtcatactttcatcaccccatgtcccgcagcctggccagtttcaccccatagttatgttgagcacctcctagcggaggggtcaggtaagtcaggtagctgcaggtggtctgagagattccattcattcatttctgggccactgatctggccaagggattcaatctatgtaaacgggttgaggcatgtctgcaagactgccttctgttccttgcctctgtgatctgggtctgcttttctgaacacgaaggagtcagacaatcagcaaagcaaggcgcagtcctggggagtgactgctataagactacagtagccctggctgaggtcagagcctatagaatttggtccagcctggccatacctgtttgtaagggcaatctactgtatgtacgtggatgtgtgttttcccaggacaaggcaaagaagatccattccttccagcctcaatctgtattagtcagggttctccagggagacagattcaacaggagagaaagagagaaagacgaaatggagtttatttattagggaaattggcaagaagtcccaaaacaggtcgtctgcagactggagaccctgggaggctggtagtatggctcaattcaagtcccgaaggcctcagaatcagggaatctgatggtgtagctctcagttcaaggccaaaggcctgagaagccaggaagggtggaggagaggggagaagtcctggagtttgaaggctggggagcctggagttgttgtccaaggacaggagaggaagaatgtgtcccagctccagcagatagcttgacatagttacctctctgtttttgttctctccgggaccctaggagattggataaataatgctttaccaggtttctagatattctttaatccattcaagttgacacctaaagttaaccaccacacaatccatagatcccagccaaggcaaaagaagctttaccccaggctgggtgcatttgcttacgcctataatcccagcactttgaggggttgaggcaggaggatcgcttgagcccaggagttccagaccagccagggcacatagtgagaccccgtctctatccaaaaaaaaaaaaaaaatgcttagcatggtggcaagtgcctgtagtcccagctacctggaggctgaagtgggaggatcacttgagcccaggaggtcaaggctactgtgagctgagatcatgccactgcactccagcctaggcaacagagcagagtgagaccctgtttcaaaaaaaaaaaaaaaaaaggccaggcaaggtagctcaccctagcactttggaggccaaggcaggcagatcacttgaggtcaggagtttgagaccagcctggccaacatggtaaaaccccacctctactaaaaatacaaaaatagccctgcatggtggtgggcaactgtaatcccagctactcgggaggcagaggttgcagtgagctgagaccatgccactgcattccagcctgggcaacagatcaagactctgtgtctcagaaaaaaaaaagaaaaaaaaaagaaaaagaaaaagaagcttttccccagcctctttttttttaggaaaaagaaaatcctatatgccttcaacatcagctggcaaatgtaaacgtatgttttatttactgtcttcccttcctctaacaacaaaaaaaaggtcattcatattatgatcaagctactataaattcagttttgagcaatgcaaataaatgtttaatcaaattctaaatctcctaagacatcatcagctttatagcttcctggctgagaaagtggtatttgtgagggtgagaagataatgaaatggctgaaatgactcaaggtagctttagtcaatcaggaaatcaacatatttttgcccctatagtgctcagtgagaatgacccattaggaagactaaatggggctttgaaaaaccagtgcttgctttacttcctactagccaggcctgctcagggagcacccagagccaaaagaagtaactcaagtatgatggaagcccagttcagaaaaaaagattatgtgtaacttccccctggaaacaaaatttgttttccactgccaggcgagccgggctgcaaattcttgaatgggatgcctgcgctggggaggatcagaggagactctgtttgagtgactgtcctgacaagctgggaaaaaaatgacatggggcatggttaaaggctggcagctgcgtggtggctcacacctgtaatcccagcactttgggaggcggaggcgggcggatcacgaggtcaggagatcaagaccatcctggctaacacggtgaaaccccgtctctactaaaaatacaaaaattagctgggcgtggtggcagcggcctgtaatcccagctactcgggaggctgaggcggagaatggtgtgaacccgggaggcggagcttgcagggagccaagataacgccactgcactccagcctgggaaacagagggagactccatctcaaaaaaaaaaaaaaaaaaaaaaggaagtaaaggctggcagctgcttttgggggggtgttcccaggagcttcagaggagtcaagaatgaaggaataaaaatcaccttaaatatttgaaggcataaagactttactttcaaacaaagcaacactagcttgaaatgtatgatatgcctcttcccagtttgttttattctccccattttggttattatgatttttaaaatcctttcattcttttcactcagaatgaggcaagtaattgatttccttatgaagaggccaggcagtccatttttcatggcgttcagcgtgcacagcaaatctaaaaccattgtctggcaaatgcagctcgcagccgcaattatttttttcaccaggtaagccggctggcgtatgtttttaaaattttattgttaagtattgtcttttactggttaaatcaatgataacattctttactttgtggttatgttactcaaaatgaggattttaaacaatgataaaaataaagcttgttagatcatttttaatggtaataaattggttcctgaagatttgattaaaaagaaaactaggtcaatctaagcagagtccaaattaggtagaaagtccatagagaacgggaaaaaaggaagttgtggaaccacagacacagtaaaaggaaaaaaattgggcaggtgcgatggctcacacctgtaatcccagcactttgggaggctgaggtggatggatcgcttgagcccaggagttccagaccagtctgggcaacatgacaaaacccccatctctacaaaaactatacaaacaaaacacattagccaggcgtggtcgtgggcacctgcagtccctagctacttcataggctgaggtaggagttatcacttgagcctgggaggtggaggttacagtgagctgagattgagccattgcactccaacctgggtgacacggtgacagagtgagaccctgtcaaaaaaaaaaaaaagaaaagaaatttatttaattaatttagttttgtgacaaagtccctttctgtctcccaagctggagtgcaatggcataatcatagctcactgcagcctcaaactctgggctcaaggcatcctcctgccttagcctcccaaagtgttggaattacaggcacgagccactgcaaggctagattttttttttttttttttgaaacaaagtttggctctgtcacccaggctggagtgcagtggtgcaatcttggttcactgcaatctctgcctcccgggctcaagcaatcctcctgcctcagtttcttaagtagctggaactacaggcacgtgccaccatgcctggctaatttttgtattttttgtagaaaaggggtctcaatatgttgcccaggctggtcttgaattcctgggttcaagtatccacccacctcggcctcccaaagtgctgggattacaggtgcaagccaccacgcccagccaaaaaaatgttaagtgttaaatcaaaaagaaaaatcaccaagccattttgcatatttttctggagagatatagatacagacacagatatatatgtagagagagataaagatatacagatagatctggactggacaccttatgataatatagtatcagttgggtataactttgttccggaaaggacaaagggaacttattaaagaagacttaaggcatatatatgtaatgttttcccaattcctcataccacttctttttattaatttttattgagatataattaatttatctaccataaattcacccttttaaataagtacacaatttagtgggttttaatatagtattcacaaggttatacaaccatcaccactatttgattccagaacatctggctgggctcggtagctcacacctgtaatcccagcactttggaaggctgaggtgggagaatcacctgaggccaggagtttgagaccagtctggccaacatggtgaaaccccgtctctactaaaaaaaatataaaaattagccgggtgtggtggtgcatgcctataatcccagctacttgggaggctgaggcaggagaattgcttgaaccagggaggcggaggttgcagtgagccgagattgcaccactgtactccagcctaggtgacagagcgagactctgtcccaacaaataaacaaacaaacaaacaaaaacagaacattttcatcaacccagaaagaagcccccaaatcactggccctactccccatttcctctcccatttcctggcaagtatttatttacttcctatgaatttgccccttcgggacattttaaataaatgaaatcatacaatatgtgatttcactaaataagacttttgtgtgtggcttctttcaaataatttttaaaattgtggtaaagtatgcataacataaaatttacactctaaccaccaccccccttttttttgagacagggtctcccactctgtcttccaggctggagtgcagtggtatgatcacgtctcactgcagcctcaaactccccgggctcagatgatcctcctacctccgtctcacaagtaactgggaccgcaggaacacaccaccacacctggctaatttttgcattgtttgtagagatggggtttcactgttgcccaggctggtcttgaactcctggactcttgtgatccacccacctcggcctcccaaagtgctgggattacaggcgtgagctaccacacctggttgtctctaaccatttttaagtgtatatttgagtagtgttaagtatattcacattgttgtacaaccaatctccagaactttttcatcttcccaaattgaacctctgtacctattaaacactaactccccattctctccttctcccggcccatggtaaccacccttctactttctgtcctttttttttttgagacagagtctcgctctgtcacccaggctggagtgcaatgtcgggatctcagctcactgcaagctccgcctcccggattcaagtgattctcctgcctcagcctcctgagtagctgggattacaggcgcctgccaccacacccagctaatttttttgtatctttagtagagacagggtttcactatgttggccaggttggtcttgaactcctgatgccgtgatacgcctgcctcggcctcccaaagtgctgggattacaggtgtgagccaccatgcccggcctactttctgtctttatgaatttgaccactctaggtacctcatataagtggaatcacacagtatttgtcctttggtgactggcttatttcgcttagcataatgccctcaagggttctccatgttgtaatatgcgtcagaatttccttcctttcaaggctgaataatatatctgttacatggatcaatcacatttgggttatccattcatcagttaatgcacatgtaggctgtttccaccctttggtcattgagaataatgctgctgtatacatatgtatgtatgtttttgcatgaccatttgtttgcaattcttttgactatatatgtatcaatagaattagtgggtcatatggtagctctaagtttaactttttgagtaactgccaaagcattttccacagtgctacatggtttcacattctcgctaacaatatataatggttccaatttccccaaatcctctccaacactttttatttttatttttttaaaacaattacagtcatgctagtgaatgtgaagtggcatctcattgtggtttgggttttaattttataatattttaatttttaaaatcaaaagaatatactttggccaggtgtggtggctcacacctgtaatcccagcattttgaggggccgaggtgggtggatcatctgagtttaggagttcgagaccagcctggccaaaatggtgaaaccccatctctactgaaaatacaaaacttagccgggtatggtggcaggcgcctgtaatcccagctattcaggaggctgaagcaggggaatcacttgacccgggaggtggaggttgccatgagtcggaatcacgccactgcactccagcctgagaggagactctatctaaaaaaaatacatatatgtgtatctatacacatatgtgtatatgcaaagcacaaacatctaagggcagggcgtggtggctcatgcttgtaatcccagcactttgggaggctgaggcaggcagatcacttgaggtcagaagttggagaccagcctggccaacatggtgaaacctcatctctactaaaaatacaaaaattagctgggtgtggtggcaggtgcctgtaatcccagctacttgggaggctgaggcaggagaatcgcttgaacccgggaggcggaggttgcagtgagccaagatcatgccactgcactccagcctgggcaacagagggagactcagtctcaaaaacaacaaccaaaaaacacatctaaggttatattggtacaaacaggagaattattcacataactaacaaaatgttaaagagtaagtcagagatgggctctgggttgacatgaactgatggtattctttctaggaggatgagaggatttaaaatctcttagccaggccaggcatggtggctcacgcctgtaatcccagcactttgggaggccaaggcaggtgaatcacttgaggtcaggagtttgagaccagcctggccaacatggtgaaaccacatctctattaaaaatacaaaaattagctgggtgtggtggtgcacacgtgtaatcccagctactctggaggctgaggcaggagaatcgtttgaactgagtggcggaggttgcagtgggctgagatcttgccattgtactccagcctgggtgacagagcgagactccatctcaatcaatcaattaataaaaataaaatctcttagccaggtgcggtggctcacacctgcaggcccagcactttgtgaggctgaggcaggaggatcacttgagtccaggggttcaagatcagcctgggcaatatagtgagaccctcatctctacaataaatagattataaaaaataaacaaaataaataaaatccctgcaagcttaaatgacaattaaaagataaaaattttgagagtttcccatgttatcaggtccccaagttaaatatattacgtgtattatttcatcgaatccttaaaataatcctatgcaataaggtcttttttttttttttttgagacagagtcttgctctgtctcccaggctggagtgcagtggcgcgatttcggctcactgcaaactctgcctcccgggttcacgccattctcctgcctcagcctcccaagtagctgggactacaggcgcctgccaccacgcccggctaatttttttgtatttttagcagagaccgggtttcactgtgttagccagcatggtctcgatctcctacctcatgatccgcccgcctcggcctcccaaaagtgctgggattacaggcgtgagccaccgcgcccaacctttaataagttctatatttaccttcatttaatagctgaaaaaactaagactcagagaggttaaaaaaaaatacatatatatgtatatgtatatatatctacatatgcaaattataacagtatgcagtatccctgggactaaatccagatctgattccagagtatttacattgaactataccatgtgactatccatacattcctaagtgttctattaataaaatagtaaagaataaattcataatttttactaccactaacctttattgtttactaggtttcaggcaccacgctaagctctttatattcattatttcatttaatgctcattttattaaactctatgaggtgggtgggtacattccattttacagatgagaagaccaaggtcaagaaacctgcccaggctggatgtggtggctcttgcctgtaatcccagcactttgggaggctgaggcaggtagatcacttgaggtcaggagttcaagaccagcctggccaacatggtgaaacctcatctctactaaaaatacaaaaattagcctggtgtggtggtgtacacctgtaatctcagctattccatagcctgagggaggagaatcgcttgaacctgggaggtggaggttgcagtgagccgagattgcaccactgcacttcagcctgggtgagcaagcaagactctgtctcaaaagagacctgcccaggatcacagagctggcccccaaacattttgtcttcccattgtttcccaagcaagctgaattcactctgttcagaatgttcttctccagttcttcacattgaccacttcttatatactcaagtttgagctcaaatgtcacctccttacagaagccttcccccttgacctcatccaaagtagcattcattgtacacctaccagcatacagtaggcactcaataaatatttgttgagtgagtaagggaaggcattccatgaaaattcctactgcccaaaattgcttcctccattctcaaagtccagaacgccttgcctacctgactcagttcctgcctgacttctggtaatgccaccttctttgaatacctataagactgtcaaccctcactcatccagcagttccagtctcctcaattctgaaataatccttcccttcactctcaaccactggagttctccttttgtttatttatttttattttagttatttttttttttgagacggagtctcgctctgtcacctgggctagagtgcaatggcgagatcttggctcactgcaacctccgcctcctgggtttaagcgattctcctatctcagtctccccagtagctgggattacaggcaccccactacgcccagctaattttttgtatttttttttcttttttttgagatggagtctcgctctgtcgcccaggctggagtgcagtggtgtgatcttggctcattgcagactccacctccctggttcaagcgattctcctgcctcagcctcccgagtagctgggactacaggcgcccgccaccatgcctggctaatttttgtatttttattagagacggggtttcaccatattggccaggctgttctcaaactcctgacctcgtgattcgcctacctcggtctcccaaagtgctgggattacaggcatgagccaccgtgcccggcctatttatttatttatttatttgagatggagcctcactctgtcacccaggctggagtgcagtggcatgatctcagctcactgcaacctctgcctcctgggttcaagcgattctcctgcttcagcctcctgagtagctgggattacaggtgcatgccaccatgcctggctaatttttgtatttttaatagagacagggtttcgccacgttggccaggctggtcacgaactcctgacctcaggtgatccacctgcctcggcctcccaaagtgctgggattagaggcgtgagccactgcgcctggcctggagttctccttttatatgttcaacaacaaatttctcttgagtctctactatatcttgctagatgtgttggaaaaagatgaataaatgcagttctaccctccacttgtaggtggagcggaagtgtaaacaagcaacttcaacacagtgggagaggtgctaaagagagacacgagtggtcactggggcagtgcacataaccaaaaataaagagagacatatacaagactcagtggtggctcagtagagcaaagccaggcaaaagatgacacagccgtaaacaaaccaaaattcaccatcaacatattttgaaagtaagtggtggtgttgatttcaaatcttggcttcatcatgcagtagctgtgtggcattgggaaaattacatatcctctgagcactagtgtctacccggggaaaatactacctactccagagggttatctatggtgaaatttaaaggaaataatgcacataaagtgcttagccctgtctctggcacataatggtacttccaaattagtactgaaaaaaaatgtatatttttatttattttattttttatttttattttttggtgaggtggagatttactcttgttgcctaggctggagtgcaatggcatgatctcggctcaccgcatcctctgcctcccaggttcaagcgattctcctgcctcagcctcccgagtagctgggattacaggcacgtgcagctaattttgtatttttagtagagacggggtttcaccatattgcccaggctgatcttgaactcctgacctcaggtgatccgcctgcctcggcctcccaaagtgttgggattacaggagtgagccactgtgcctggccgtatatttttattttttaagagacagggttttgctctgtcacccaggctggggtacggtgatgcaatcatagctcattcattgcaaccttgaacagttgggctgaagtgatcttccctcctcagcctcccaagtagctggaactacaggggcatgccaccatgtgtggctaagtttttttaaacatagtttttagagacagggtctccctatgttgaccagactagtttcgaactcctggcctcaagcaatcctcctgccttggcctcccaaaatgctgggattataggcatgagccactgcatctagcctgaaaaaaaatcttaaatataggaaaagaaaaaactttaagcacaaagatgtatttataataggaacatttctggaacaaactgaaaatcctcttcttcttcttctttttttttttttgagacagagtctcactttatcgcccgggctggagtgcaatctcaactcactgtaacctccaccttatgggttcaagcaattcttgtgccacagcctcccgagtagctgggactataggcatgagccaccacatgtggctaatttttgtatttttagtagagatggggtttgtcatgttggccagccttgtctcaaactcctgatctcaagtgatctatccgcctcggcctcccaaaaaggccaggattacaggtgtgagccaccacgcccagtctaaatattctcttgatggagtattatgtagctgttaaactgtaacaatgtctggcagagtcacagatacaaaaagtactagataaaatgtgaatctggtgtgatcttggctatgcaaatagatacccaaagtccctgggcctctccagcctgcggttttaaatgaggtcacattagccttttacccaaatttcactgccccattgcccccacctgctcttctggacctctgcgaaggcgctgggggccctagggaatagttaaaagtgtatgtcccacccactcaagtattcataaactgtctgtgtttgatgggcacagccaccctttgccaagccttcacccttgccacgcctcataaagaacacctccctgtggggttgaccaaaccacccggtttgcctgggactgagaggtttcctgggatttgggacttttagtactaaaactgggaaactctttggcaaactaggagaagttggtcaccctgactcactgtgcaaagctgcaattttttttttttgcacttccaagctgcaaaatttttagatcaccgaatggagttttttttctcagctagagctcagctccattcttcccaaaacagggactggtgaacctcccagaggactgggtgaggtgaatattcatgttttaattcaggggacttttatcccaggtaccagggaagcaaaaaaacaaaaacaaaaacaaaaccagtcaaaacgttgcttgagaaacagctaattagagcgtgggtctagacaagagttgctggtttgggaaacatgagcatattgggtggcaagtatcatgagactggactgggtggtccaagagacctgtaaacaggagagaagcctgagggtaatgacatttgagccaatctgcggaggtaagtcagtccattaaagaaactgaggccgggcctagtggcttacacctgtaatcccagcatttgggaggccgaggcaggcagatcacttgaggccaggagttcgagaccagcctggccaacatggcaaaacctgtctctattaaaaataaaaaaagtagccaggtgtggtagtgagagcctgtagttccagctactcaggaagctaaggtggggggattgcttgaacccagaaagttgagattgcagtgagccatgatcacgccactgcactccagccagggcgacagagcaagaccttgtctcaagtaaataaataaatacaaattacaggctcacacctgtaatcccagcacattgggaggctgaggcaggcggatcacctgaggtcaggagttcaagaccaccctggccaacaaggtgaaacccccgtctctactaaaaatacaaaaattagctgggtgtgggccatgcgtggtggctcacgcctgtaatcacagcactttgggaggccgagacgggtggatcacgaggtcaggagatcgagaccatcccggttaacacagtgaaaccccatgtctactaaaaaaatacaaaaaaattagccgggcatggtggcgggtgcctgtagtcccagctacttgagaggctgaggcaggagaatggcgtgaacccaggaggcggagcttgcagtgaggagagattgcaccattgtgctcctgcctgtgcaacagagcaagactctgtctaaaaaaaagaaaaacaaaaaagaagctgaggactaacgggagtggccaaagagataggaagaaaactaggatttgaggtttgtaagttttggtgcatagtttctgaaatttgtccagtttccaatttggctatgccttcaccctaaagctagtagtgatactgattgatcatgcttcatatcatcaagtagaccactccttctctccttccagctctgaaatgtaggtgattccccagggtatatatgaggtgctcttagtctctctgctttctcttttataatagtttagtctgaggctgggcacaatggctcatgcctgtaatcctagtactttgggaggccaaagggggtggatcccttgaggtcaggtgtttgagaccagcctggccaacatggtgaaaccccatctctactaaaaatacaaaaattagctgggcatggtggcgcatgcctgtaatctcagccccctggggaggctgaggcgggagaattgcttgaaccagggaggcggaggttgcaatgagccaagattgcgccactgtactccagcctgtgtgacagagtgagactctgtctcaaaataaatagataaatagtctgctggctgcaattttcatctcaatgagactggttcccaatttatacccccagcttcaatccttccagagcttcagtctacatttttttctttctttttccttttttttttttttttttttttttgagacagggtcttactctgtcacctaggctggagtgcaagcagtgtgattttggctcactgcaacttctgcctcctgggttcaggtgatcctcccacctcagcctcctgagtagctgggactacagacacgtgccactacacctggctcatttttatactttttgtagagagggggtctcaccattttgcccaggctggtctagaactcctgacctcaagtgatcttgccgtcttggcctcccaaagtactgggattacaggtgtgagccacttcgttcagcccagtctacatttcaaactgtctcttggacatttccacctcattatcttgtcaataacccaaattcagcgcacttaaataggagcaatagccagatcataatcatagagatcagtattggaaggaaccttagagatgatctaatctagaccttcctgattggagagctatagactgatacacagtgaataggataagaggtgggtggggatagatattcatcctccaagctctcagggtgtacgcagcctctgatccactttgttcatgacaacctcatcccctgacgggcttaagagggtggggtctgatggtgggcaggagcccaccattggcattcagttgcatagcacattattgcctgcgtagacaagggacccacgaagatgctagaagagtttatctcaggagcccaagaagtataaggaacgatccaatgtgcaggaaggtgtcagagtgtgtgtgtgtgtgtgtgtgtgtgtgtgtgtgtgtgtgtacgtgtgtgagagagagagaggagagaaagagatgagggctgggtgcggtggctcatgcctataatcccagcactttgggaggctgaggcaggcggatcacttgaggtcagaaattcgagatcagcctggccaacatggtgaaacctcgtctctactaaaaatacaaaaattagccgggcgtggtggcttgtgcctgtagtcccagctactcacgaggctgaggcagaagaatcgcttgaacccaggaggcggaggtcgcagtgagctgagatcacgccactgcactccagcctgggcaacagagccagacttcatctctaagaataataataataattaattaattaattaattaagagatgggggttgggaattctggggcaggcagcttagaaactctgtcttcacatacgtttgtattggataattttggccaatataccacaaatgatgtccaggctgtgaagtgattgtcctaataatgcatttgtgttctgtcaactggaacctcatcatgattttgaaatactcgctatggcaagtttgattagatctaaaatccagaaggaatattctaagttcttttttttttttttttttttttgagacggagtttcgctcttgttgcccaggctggagtgcaatggcacgatctcagctcactgcaacctccgcctcccgggttcaagcaattctcctgcctcagcctccacagtaactggaattacaggtatgcaccaccacgcccggctaattttgtatttttagtagagacggggtttctccatgttgaggctggtctcgaactcttgacctcaggtgatccgcccgcctcggcctcccaaagtgctgggattacaggcgtgagccactgcgcccagccggaatattctaagttctaaggacatttgtcaatgaaagaaacaaaagagctttaaatataacttaaatatcatttccactgttgtgaatgtttggttataaaagatggcttaaattattttagcacatacagttgcaaatggtttcttgtcatttaaggagatcacgcaccaggggtggtggctcaagcctacaatccctgctacttgggaaggtgaggtgagaggatgcattaagcccaggagtttgaggctgcagagaggtgtgactgcatcactcactccagcctgggtgacagagtgagatcccatttcctatttcttttttttttttttgagatggagtctcgctctgtcacccaggctggagtgcaatggcgtgatctcggctcactgcaacctccgcctcctggggtcaagcgagtcgcctgcctcagcctccccagcagctgggattacaggagtgcgctaccaccacgcctggctaatttttgtattttttttttttcagtagagatggggtttcaccatgttggccaggctggtcttgaactcctgaccttgtgatccgcccaccttggcctcccaaagtgctaggactgcaggtgtgaaccaccgcgctcggccatgagatcccatttctaaaaaaaaaaaaaaagaaagaaagaaagataaaaagaaacagatcagttaaagagactcaatcaggacttaccttacatgagctatttagagtgcaaaacagaataaaaagttaggtatacggatttaagttcaaatttctcattaaaaaaaagagggcttttttggggaaagtgttacaaatgcaatatttaatatcttctccatatatattttgtttttattccaattgtattctttaaagaaatgttttaaaccacattccatatcccctgctaattttcattgggtgctatatatgtggaaagtattggaaagtctggttctaacccagcccccttaactgatttgtgagcaaactggggctcggtcagggttgattgacccatctgacgtcacagagctaatcacttccttcataaatcagttcctgtcctctgactttctgagccttaactgcagatgtgtgacacattacccaactcatctaagtttaaatcatatcaggttggtttctctctgcgtggctgtttttttttgtttgtttttcgtttttcgttttttttttttttttttttgagacaagggcttgcttagttgcccagactgctggaatgtagaggcacaatcatagctcactgcagcctcaaactcctggactcaagtgttcttcccacctcagccactcaaagtgctgggattacaggtgtgagccaccacacctagcctgtcatattccatccaatctgaactccctcccaggtttaaggaacccttcacattatatgtagcctgtaacccactatgggaactaagatgccaggcacttgccatcatggtccctcctgctgctagaccctgcactcaggcacacccagcgcagccttttagctggaagccagaacagctgtgaagcagtggccctggattgatgctttaccaggacaagctgggctttctgccaggcagctgccatcatgctgtcctcactggtccaattctatagcctgattttggacacttgttggctgcaaagtctcagagcctcattcttgggcactatcagagattctgtgagcttgaagtaggcaatggttctgttgcttgccatcaagaactcaaccgataggccaggcatggtggctcacgtctgtaatctcagcactttgggaggccaaggtgggcaggtcacctgaggtcaggagtttgagaccagcctggccaacatggtgaaaccccaactctattaaaaatacaaaaattagccgggcatgatggcatgtgcctgtaatcccagctactcaggaggctgaggcaggagaatcacttgaacccgggatgcagaggttacagtgagccgagatcatgccactgcactctagcctgggcatcagagccagactccatctcaaaaaaaaaaagacaagtgccataaaaggctcacatttgccgggcgcggtggctcacgcctgtaatctcaacactttgggaggctgaggtgggtgaatcacaaggtcaggagtttgagaccagcttggctaacatggtgataccccgtctttactaaaaatacaaaaaaaattagccgggagtggtgacttacacctgtagtcctagctgcttgggaggctgacgcaggagaatcgcttgaacccaggaggtagaggttgcagtgagccaagatcatgccactgcactccagcctgggtgatagagcaagactccgtctcaaaaaaaaaaaaaaaaaccaataaagaaattggtaccagagtggtggtaggccgtagatgctcagggaaatggaatgggagtggtctgtaactctcactctagtcttctgcggccaatggtagaaaatatgtatctagtaatacagaatgagactctgacagccaatttgacattgtttggagcacagtgtttgcaatcaatggcaaaagattttaacaaaatcacccatgccacctggacttcaaggcaagtcttgaagactggccatagctaagggacatataacagatgtaatgaagttctctggaggctgaggcaggagaatcgcttgaacccaggaggcggaggttgcggtgagctgagattgcgccattgcactccggcctgggcaacaagagcaaaagtcaatctcaaaaaaaaaaaaaaagaagtcaaggactatggatggggtgatttcatttgacagtactggatgcttggtggctctctttggatttagaagactagatatacaaggctgggcatggtggctcatgcctgtaatcccagctctttgggaggctgaggcaggtggatcacctgaggtcaggagtttgagaccagcctggccaacatggtaaaaccccgtctctactaaaaatacaaaaattagctgtgtgcctcgaatcccagttacttaggaggctgaggcaggagaatcacttgaacccagaaggcagaggttgcagtgagccaaggttacgccactgcactctagcctacgtgacagagtgagactccgtctcaaaaaaaaaaaaaaaaagaagaagaagaagactatatataccacgtttgtttgtgctgccttaacccattttcagagtgacctgaggccttgctaacattgagccacaaggcagagcaagagaagattcttcagcaggtccaggctgtggtgcaaggacttctgctaattggtcctcatgacccaatgtacccaacagcactctctggacaaccacatactggggtgctgtatgaagggcgcatgaaaaccctgcaaaggagcatcctatggttgtgcttagggttttggatcaaagccttgctctctttggctaataaatattctttctggaaactggtcttactttgctcctgggccccagcaaagattgaaagccaggtgaccacatacctgtgcagcttgtcaggaactgagtatttgttccacttagccaaaaaatgtccagtagcgctcccttccccaagaagacatgtcgtaggctgggcgcagtggctcgtgcctataatcctagcactttgggaggctgaggcgggcagatcacttgtggtcaggagttgaagaccagcctggccaacatggcgaaaccctgtctctactaaaaaaaaatacaaaattagctgggcaaggtggcagccacctgcagtcccagttactcaggaggctgaggtgggtggatggcttgagcccggcaggtggaggttgcagtgagccaagatcgcgccactgcactccagcctgggtgacagagcgagaccatttcttgaaaaaaaaaaaaaaaagttatgcaaaacacctctcattccatctattgtacactttttgtaaataattttgctttactattcaattataaattttgaagggtattcccacttctaatatctttgtattccctataatacatagcatacttatttaattttagagctggggatctcactatgttgcctcaaactactgggctcaagtgatcctctcacctcagccttccaaagtgctgggattacaggtatgagccaccgcacctggcagtacatagcattttacacactatgtaggatatacattgcaaactagtagactctgggctatatccaaactgcctattttttatttattttttcttttttgagatggagtcttgctgtgtcgtccaggctagagtgcagtggcacgatctcggctgactgcaacctccacctcctgggttcaagcaattctcctgcctccctagtagctgggattgcaggtgcacagcgccacgcccagctaatttttgtacttttagtggagacggggtttcaccatgttggccagaatggtctcaaactcctgacctcaggtgatcaacccaccctagactcccatagtgttgggattacaggtgtgagccaccacaccgggccaagactgcttatatttttatcaatctgtagtgttttgttctgagacagggtcctgctctgtcacacatgctggagtgcaatataaacatatattaatatttattgaaataaatgactaccaaaaagtaatttaaagaaaaatagttgtctgggcatggtggctcacaccttcaatcccagccctttgagagaccgaggccagagaatagcttgaggccaggagttcgagaccagcccgcgcaacatagtgggaccttgtctctagaaaaaatttgaaaattagctgggcatggtggtgcgcgcctgtggtcccagctgcccgggaggctgaggtgagaggattgcttgagcctgggaggtggacgttgcagtgagctgcgattgcatcacttcactctagcctgggtgacagagcaaaaccccgtctcaaaatttaaaaagaaagaaagaaaagaaaggaaacctaacaggattctgattctgtccaccaaatggcttatttcttttttctttttttgagacagagtctcactttgtcgcccaggctggagtacagtggtgcgatcttggctcactgcaacctccgtctcctgggttcaagcgattctcctgtctcagcctccagagtagctgggattacaggcaagtgccaccacgtccagctaatttttgtatttttagtagagatggggttgtaccatgttggtcaggctgatctcgaacccctgacctcaggtgatccgcccgcctcatccttccaaagtgctgggattacaggcatgagccactgcgcctggtggcttatttcaatctagataggaaaatataacacatatgtgaaatgaaaaaatacaagcactaattgccaaataaatgtattcaatataatttggttgagcactatgggtgacaaatctgtatatgcctccaggaaccaggtaagtaatgaaagtcaacaaagtaggggaagatgaggacttggccaatggaagtgccccccgcttttttttttttagacagactttcgctctgttgcccaggctggagtgcagtggtgtgatctgcactcactacaacctccacctcccaggttaagcgattctcctgcctcagtcttacaaatagctgggactaccggtgctccatcacacctggctagtttttagtagagacagggtttcaccatgttgaccaggctggtctcgaacttccgccctcaagtgatctgcctgcctttgcctcccaaagtgctgggattacaggcatgagccaccacgcccggccctggccccgtattttgtttaaagagggtggctgggcacagtggctgtagcttgtaatcccagcactttgggagggaggcgggtggattgcttgagcttaggagtttgcagtgaaccaagatcgctgggatatgcatatttaaggtttcaatttttgtgtctccaaataaaattctcagttcctcactaccttttttttttttttgagatagagtcttgctgtgtcacccagactggagtccagtggcacgatcttggctcactgcagcctctgcctcctgggtttaagcgattctcctgtccgcttcccaagtagttgggattacacgcatgagccaccatgcccagctaatttttgtatttttagtagacaggatttcaccatgttgcccaggataatctcgaactcctgggctcaagtgatccgcccacctggcctcctcaagtgctgggattacaggcctgagccaccgtgcctgaccaccctcttcaaacaaaatatgggcacctccattggcctaggtcttcatcttgcctactttattgacttacattacttacctggtccctggagacatatacacatttgtcacccttagagctcgaccaaattgtattgaatgcatttctctggcaattagtgcttgtattttaattttcatttcacatatgtgttccattttcctaacaagactgaaataagccatttggtatgcagaattctgttagatatttttatttttatttttttgagacggagtcttgctttgttgccaggctggagtgcagtggtgcgatctcggctcactgcaacctccacctcccaggctcaagcgattcttctgcctcagcctctggagtagctgggactacaggcacgcaccaccacgcctggctaacttttgtatttttagtacagaacttttgcatttttagtagagatggggtttcaccatattggccaggctggtctcaaactcctgccctggtgatccgccctcctcagcctcccaaagtgctgggattacaggcgtgagccaccgcgcccagcatcttttttaaaaaaaattgagacagggtcttgctctgtcacccaagctggagtgcagtggtgcaatcacggctcactgcaacatccacctcccaggctcaagcaatcctcccacctcagcctctcgctagctgggaccacaggtgcacaccaccatgcccggctaatttttcaaattttttctaaagacgaggtcctgctatgttgcccaggctggtcttgaactcttgacctcaagctatcatccggccttggcctctcaaaggactgggattgcaggtgtgagctaccacgcccggccaactatttttctttaaattacttttcggttgtcacttctctcaataaatattcatatgtttataacacctttctcttatctaaagagctgacctcaaccactcagggttgagtcgctgtgataaggtttgagggtgcctgaaatgtcatcatgattcgtcctttgggctaagctgaaacctagtgacttgtcaggtcaataaattaaggttatttcccgataatacaaacatttaacaccgtgaagtaggttttaggcaggattccctcttttccactgcaaaggagaggtaagttcttgctgaggtgatcgaagtcctagctggggcactgggaaggtggcgggacattggaacgtgcagtagttgcgttctggagtttactgaggctttcccagtgcggattccacgctacaggtcttagggcgcccctccctccgggcgtggcagcccggggcgtggctcctggcacagatccggagcagttgtcattggagtcattttctggactccagctccatgcttcagagtttcctaagttcagggggcttgtctctctgtcccctcgactaatttccctctgtcgctggcgctgcccggtgccctcggtcgcttgggccgcccctctccgcgacttttttttttctttctctcgctggctctttcagcatcagtttccatagggggagggaagggaatgatatttgggggctcccttgccttcctctccgagccgcgaaaggggagacgcggggaggaggtccggccggctttgggctccagccagcggtccgcggagactttggtctccgaaggcctttgacgccgggcatttcgcgagctgcgcgcccctctcagccgcgccacctgcgcccggagttttgccgcgccacccgcgcccggagtccagccgcaccgcgctgtgccgagcccaggcgcccagggctccccgcccccgactcgacgctcccgcgctccccctagcggccgccgcgccgcttcgctccgtcccaggctcgtcggcggcgcagctcacgtgaccgcgctctgggcctgcggccgctgtcggttcccccagtcaccgagcgagagggaagaaacaagatggcggctgaaggcgatccggagtggggccccagcaattcggattgagccttctccctccacccgcttccgtcggccgggcccctcccgcccggccccgcgggcctccccacccggccccggcgctccccaccgccccccctgcgcccgcccctcccccttcgctttccttctccccccgcctcggctccgacatgaggggccggcggggcaggccgcccaagcagcccgcggctcccgctgcggagcgctgcgccccggccccgccgccaccgccgccgccgcccacgtccggacccatcggggggctccgctcgcggcaccgcggcagcagccggggcaggtgggccgccgcccaggctgaggtggcgcccaagacgcggctgagctcgcccagggggggcagcagtagccggaggaagccgccgccgccgccgccggccccccccagcaccagcgccccgggccggggggggcgaggaggcgggggcggcaggacggggggcgggggcggcggcggccacctggcccggaccaccgcggcccggagggccgtcaacaaagtggtgtacgatgaccacgagagcgaggaggaggaggaagaggaggacatggtctccgaggaggaggaggaggaggacggcgacgccgaggagacccaggattctgaggacgacgaggaggatgagatggaagaggacgacgatgactccgattatccggaggagatggaagacgacgacgacgacgccagttactgcacggaaagcagcttcaggagccatagtacctacagcagcactccaggtacccacccagcccagttgctgcagactccttccccacctcctctgccctccccccttgctcactcgtgtgctgtgcatcctgctccgatctccccccaaccccgcctcccccccaaacagaggggaaatgcgacggcacatcaagtggcaaaaaactagatttacaagaggaaagaggcgcattgttcaaaatggagattgcattgttgcagtttgcaggccacactcgctcgctctctctcccccccccaaccccctttttttcctcttcaaaatttgtgccagtgcagtgtctccaccgggcaggattgaaactttggcaaacacatatccattgcattcatttttctccccttgttttggtgtggttttctggaatgaaagaagcctcttgttttgcaaacctctttgcatttctaatgtggtttctttcggatttttattatatatctgttacttaaaagggaattaaggatttggacagattgtggtacacaaacacgcacaaaaaaatgcgttttcacacccctagctgtggttttaaaattgtgttaaggaaacggatcatttgggttagtaggggaaccttatctggtcctgtgtgtttgtttttattcttcgagtgctaatgggcccgtgcaacagttgctgttaaatggctgattaaaaagcaacgcagaaagccaaacaagacccaaccaaatttggttattcatccgattcagaattattttggttaaatcaaaaataaaagtacaaaactacaggaacgcgcgtcttaactcatttgatcgctttgccttgcttgggaaatgcagtttcgtgtcacctgttgcagaagatatgtagttgatcatctagacataattgccgaagatgaacttctggaacaacttctaagtcacacggcatcagtatcagatttattacacaacgactttttcttttcactctatttctgaggaaaaagccctcccgaaatccgtaatgaatttctccatggtaacccctcttctgttttctcacagaaagtttctctaggctggtgccgagatgcatttggtgaaacacccccggccccccgcaaaaggctgctttgtacatagtcacaatttactaaattgtgaaattaacataaccaaagcaacaaccggcaagacttttcctttataattttgcaaatctagattaattaaattagaatctggttttaaaagcctttaaaaaataaagtttatgagaaaatatttgtgaggaaaaaagaccttttttttcgttgaagtaaggtgtgtcatgtctttctcagagagactagggtagtagaagtggttaacttgaaaagtttgattttaataaatgcttaaatacttattggagaagtagggtagtattaagccaaatgtgaacccacataggttgtcctaacataactgaaaaaaggtaatttcttttgcccagtggtcagaatcgttgccagtcttgtccggggcaggctgtctggtgaatgaagggaatgaatcaagtgtcaggtatttatgtcttatatgtagaaaggactacatgtaaatccttgccaacttaattttagtactttttttttttttttttttgagagggagtcttgctctgtcgtctgggctggagtgcagtgtcctgatctcggctcactgcaacctccgtcttccagactcaagcgattctcctgcctcagcctcctgagcagctgggattacaggtgcccaccagcacacccggctaatttttgtatttttagtagagatggggtttcaccatgttggccaggctggtctcgaactcttgacctcgtgatccgcctacctcggcctcccaaaatgctgggactacaggtgtgagccaccgcgcccagcctagtacgttttttatagtaataatttttaccttaagaaatcacatgttggtcttctttgcacccagagccggtaattgaaacacggagactgaattgcatacacccctggaggaagttttttctggttaaaaagagctgagacattttggcaggacagttcagctaactttaagtcctattcgaaggcatagcaaataatatttaagattgatgggtgtgcatatgctgacttaaattacaatttgtagctaggtgtcctttaagaaaaatgtgtttacttttgatacttttgtgacattttgtttttctttttttgagaaggagttttgctcttgctgcccaggctggagtgcaatggcacaatcttggctcactgcaacctccacctcctgggttcaagcaattctcctgcctcagcctcccaagtagctgggattaaaggcatgcagcaccacgcccagctaattttgtatttttagtaatgacggggtttctccgtgttggtcaggctggtcttgaactcccgacctcagttgatccacctgcctcagcctcccaaagtgctgggattacaggcatgagctaccgtgcctggtctgacattttgtttttcttaatgacacttgtgtctacttgtcttatccttatatgaaattattaactccttagagataagtattgagcttattccccctgcagctcctgtaacagagttttgcacatagcaggtgctcatcaaagattggttggataaattattgttagtagataagaacttgtaatagatgaagttttgataactctacagtgggtgtcataatctctaaatactttggatttaggaaactaaaaattggtctaattgttttttgtttttgttttttgttgttgttgttttttctaattggtttttgatggacaatttgatcagtgaatgtttttttttttttctgtgaacgtttttcattgcaagagttactttgtttttgagttgctatttcatattgcttgccaggcattttcctttattggctgtgatgttaatttggatgctttaccttttgcaacacattatttttaaagattatggtaaaatagatgtgacttttttttttccttatctcttctaaaaaaaaacgggatacatgtgcagaacgtgcaggtttgttgcataggtatacgtgtgccatggtggcttgctgcacttaccgaccggccctctaagttccctccccttgccccccaccccccggatgtgacattttgagttctaaacttttagaacatgcccacttgcctggaatgagtaacaatgcatgacagtgagttgattaggctaagtaccagtttcattggttttttagtctgtacttcctggaggaaggctgtcaggtaaatgtgtagatagaagaaaaaaagttttagaactggtttaagatatccgaataacacataaagaagtatgattgatgagtttgaatcctgttgtactgtgaaggctgaaagaggaatttaccttattggtaatttagagtaatttgattaatttttatagtttacagggttggtttaagtactgacgtgacattcctaacataagaaatagctcactcctaatacaagaaataactcagtattttgtaggtaatgtaacaatgcaaagacattagttgacattactaaagtcatgaaaggtttattcattgaagattgttttccttttatggaaaaaatgtaaggatgccaactttttagtataaaattgaaatcacctagttttgcttaagctaaaggcatatcgctgaataatgctttaattcatttttactttttaaatttagacttacttcagcctataggttttatgacattgccaatatactgagaaggattgtataggaagtgttttcaataggcatttggtaaggttctgacagcactttgaaattaagcatttgctaattttaagaaattatatttaaaacagaatggttcttgtgttgcagtctcagtcttgtgtgagacttctgagaatacttacctggaattttaaaacttggaacctctgataacttcatgaaacaaaaaccctggtgttaccctgggagagttagtgatttatgtcctctaaggattgtgacattggagatcagtggcagagatgccatgaatgaaccatagattcaaattcaagcagaatttgtcactggtttgacaatattattcctatcagtgtcaatatcttttcagtataatttctgattgctgcatgcgaggtacgcagtgcagtgggcattttaaggagggcgagataatataccccatttaaggggattgatgtgggcatacacttcctggatgggcatgtggagagtaaggaaaggcagattgagggagggagggagggagagggagcgggagcgggagggagcagcaggcactgatagtaaagtgtgggcagtctcaagtaactcggtttagcaagagcctgagtgtgtgaataggaaataaaccaaagctcctttgtatgctgtgttgggcagtacctagaggatcaggctatagcaactgtactttcccccttttctgtagaatagggattgggctggattgtgatcctcagccctttttcactcctgaacacccagaggagttatgttgtattcccagcagcaccatgcacaaacatgaaacagaaccatatcaaatcacagagatgctgttgaaccactggtgtagctgtttctcccaaattgagagaattactggggaaatggcctgaagctctctctctttcacatctgtttaattttgggtattgggatgatcggaagatcttgaaagagtggggtatgatttcagagggatgccacgaagtatagcttagattctcttctgcaggatggattgacaaggacgagatagctggtgggttttgtagccctggatggaagatcagtccaggaggcactttagagttcttcaggccttgacacatagatgtgtagagagaggaatgcattacatatgcctccctaagaatggtagcactttcagtaacaatggggaggtcaagattataagggaaattaatgacatctgttttcagttatcagcacctcaagaggttaaacatgagaattaaacaaaatgagagccaaaagggttatgaaaaagttgggcaatatgatttgtgagtagtagagaggtgtgtcctaggtatgcattaataaatagtcttgcacacagttcgtgcttttctattctgctcacccacgggcgtgtttggaagtttgtattgaaacatgcgtatcacaggactggggatgttaagaccaggaactctggtctcttctgttaggtcctcctttcctctttcctcaagaccctgtgtcttccctttgactaaagacccttaatggtggagacatgggggtgagagactggtagtcatggtgggcaagtagtattctgggtgacacaggagcaaatcctagctgatgcccttttcccttcctgctccttagccaggctggaatccctcttcctgggagatcttccctgagtcctgttttgcaccttggtcttccttctctttgagtgcctgcttacggtggttatgatctcagcactagcttaatgctgacactgattattctaattttatttatttatttatgagacagagtctcactctgtcacccaggctggagtgcagtggcataatctcggttcactgcaacctccacctcctgggttcaagcgattctcctgcctcagcctcccgagtaggggactacaggcgcctgccaccacgcccgtctaatttttgtatttttagtagagacagggtttcaccatattggccaggctggtctcaaactcctgaccttgtgatccgcctgcctcagcctcccaaagtgctgggattacaggggtgagctgccgtacccggcctctaatttttttcatgcttttggttttttaaaatgataagcctcaggaggcagcatgtttcttaatttaaaaaaaaaaaaccacttatacattaaaatgcactttaaaagatcgaaggtgaccgtatagaaataattaaaatgcacgtaaatataattataatgttttaattgttttgtctgctggtatatatctaaaatttttatgtttttctagatagtaagttatattcaactattattttgtgattgtcacattttaaaaatagtgacagtaatagctaaatttattggacatcttctgaattgctgaatgattttcaagcaatatttatgaaaattcagtttttaaaaggtaacagctgtatggagatataatttatatactgtaaaatgtacccttgtaaagtatataatttagtggtttttttagtatattgacagagttgtgcaaccattaacactacctaattccagcacgtttttatacccccgcaaaagaagcccgcaccgtcagcatcactccctgttcttcacctccctcctgctcatccctggcagccactaatctactttgattccctgttgattcgcctcttttttttttttttttttttttgaggcagagtctcgctctgtcacctgggctggagtggagtggcgggatctcagctcactgcaacctccacctcccgggtttaagcgattctcctgcctcagcctcccaagtagctgggattacaggcacctgccactgtgcctggctaattttttgtatttttttttttttttagtagagacagggttttactatgttggccaggccggtctcgaactcctgatcttgtaatccactcgcctcagcctcccaaagtgctgggattacaggcgtgagccactgcgccccgcctgatttgcctcttatggacatttcttataaagtggaatcatataatatatgtcttccatcatttagcctaatgttttcaagcgttatgcatatcttaacatgtatcagtactatatttgaataacacttcattgtatggctatacagccttttttttttttttatggagacagggtcttgcagtgttgcccaggctgacctcaaactcctggactcaggcaatcttcctgcctcagccttccagcctccagagtagctaggattacaggcacacatctctgtgtccagagaccatgttttgcttatccatttcttaagttcatggacatctgaactgtttccactttttggccattaggaataatgctgctgagcacattcgtgtacatgtttttatctgtacgtatgttttcatttctcttgggtatataactaggattatttgctgtattattgcaaattcagttttaatttctttcttttttttttttttgagacagagtctcttgtcgcccaggctggagtgcagtggcatgatcttggctcactgcaacctctgccttctgggttcaagtgattctcctgtctcagcctcctgagtagctgggactacaggtgtgtgccaccatgcctggctaatttttgtatttttactagaagagggtttcaccatgttggccttgcttgtcttgaacttctgacctcaagtgatccacccgccttggcctcccaaagtgctgggattacaggtgtgagccaccgtgcctggaagaaagtaattcaggagttagaatgaatccttagtgatagattggttaggctgggatgtggtgagtgggagaaaaggattcaaggatgaactgacttctgaatctcccttatttctcttttccttattcactccttatttcttctcttcatctcgaatggatctagtaatactgatttctttgtagttctcacacacctaactcctagtcatccatccatcaccttctccagcctgccttctctgatcaccattccctttaccgccaggtggggctaagttcctgtgtttcccacccgtataacctccaggaccatgtgcattaagtgttttagtttccaaatatttgggaattttttagctatccttctgttactgatttctaatttaatttcattttgttcagagagtatactttgtatgactttaattttataaaacatttttagaggtttgttttgcaccccaaaattttgtcagtctaagtgaatgttccatatgtacttgaaaagaattttgtattctgctcttgttgagtggagtattgcataaatgtcaattaggtcaagtttgttgataatgttactaagatctgtctgactttctgcttgttctgttgattactgagagaagtcttgaagtctgcagctattgtgaaggatttgtctgtttctccttgaagttctagcaatcttcatgtattttgaggctttatattcatgtattttgaggctccttcctaaagtccataaacctttaggaaggattattttatcctcttaattatttaacccctttatctctatctttatctgttaagacatggagctgaaatgggcttttaatatctggcccttctttaattacaacctactttgggcagggacagtctcattcagtctctgtagtgcctggttcaatctcttgaatgcagtaggcagcacaagtaattgtggaactgaatgatgagtcaaagaaagcctgtggattcttttcacgctctatactgtccagtatggtagccactagccacatgtggagagttaaattaattaaaactaggcaggccaagcgtggtggctcatacctgtagtcccaatactttgggaggctgaggtgggaagatcacttaaggcagcagttgaagactagcctgagcaacatagtaagacactgtctttacaaaagaattaaaatagtttggcagaggttggcatgcctgtagtcctacctaattgggaggctgaggtgggaggattgcttgagcccaggagttagaggccctagtcagctatggaccatgccaccacactccagcctgggtgacagagtgagaacccatctcttaaaaaaaaaatttaagtaaaatgaaaagttagtttctcctgtggcactagctgttatatgttcatttcaagtgctctatagccacatgtattgcaccacacaaatgtagagcatttggggcatttcatatcattgcagaaagttctcctggactcattgtagtcagtctgcctctgttagaccagggggaatttacctaacatctctttttctctagccttttatttgccctaaatcctgcacagcttgggtagccccagcactctggctgagtgaagtcctcctttgtggagactctgggcccagcattatttgtgtatgtgatggtattgcatttctgcaataagatttggggtcatgtgtgagatgactttccattatttgttgtccttggtggtagggtgaagaggaagttaacatgtgattagaaaatctgccacagtcctggtaattttttttttttttttttttgagacggagtctcgctctgtcgcccaggctggagtgcggtggcgcgatttcggctcactgtgagctctgcctcccgggttcacgccattctcttgcctcagcctcccaagtagctgggactacaggcacctgccaccatgcccggctaattttttgtaattttagtagagatggggtttcaccatggtagccaggatggtcttgatttcctgaccttgtgatccgcccacctcagcctcccaaagtgctgggattacaggcgtgagccaccatgcctggcccagtcctggtaaaattaagctaaaagttatatatataggccagaagagaaggaaggattaggattcagagacttttggttgagaaattaaatttgataattcagagaatttcagtgttataaaagtgtaaaagctgatatgcaaactgaattgcgagatgttagtatgtcctagtgtgtctgggttctcctgtataaaacgtcttaggagtcactggccaaattatttatctatggaaccccctgagatttgctaagaaagttatacttagacttctttctactcatggatatgttctgtaattcacacgcttgggaaacggcatggccatgtgattcataccaaatggcaatgttcagtaggtgcagtttatatattttactagaaatatggcttcttgctcgatttcagtatgttcatagtgcctcttttgaggtctgtgtatagtatatagtatattctatttatggaagttaagaagtatttcagaaatgcatgtattaatctgtgtggaatttctcttgtcctgttctaattcttgcatagatacttgtctcaagagatggtccaacatttaaaatagtgaatgacatcttagctcatcctaaaacaatcctttctaaaggtttatgaacttattcatagagcctcaaaatacatgaggactgataaaactccaaggagaaacagacaaatccttaacaatatcgtagacttcaacactcttctcacagtaatcaagagaacaagtaggcagaaagaaagtgcagttttctgtttttgtagacagcaaaattatttcacacacttcttaaagtcttattcagtaagttactcatttctccaccttatgactgtactgtgctttcaaagtgctgtgcaaagagtaaaatgttttaaggtggttttactgtaatttcacatacatatttgaacttttgagtctgaattatccaggtgaaatgcattggatttctgatcctctgtaaacttggaagattaccttcttccaggtatattggttttccttaattgctttaatagcatgagttgtgaatcttctctgtgtctcagaagaaacctaacagtggagattgtttatggcaagggtcacaaatttacatgctcaggttaggaccctctttaaggtaaagacatgaagtgcccccctttttattaatacataactgcatttgctgataatattgatttgccttaaaaaaactagtcctattgagaattcaggctctttttgcgtttacagacagtgctgtcctgaatgtgctagagatgtacctttagtcacttaagctggtgtttctgtagggtagattcctaggactgggattggattgttgcattatagtgtgtaccatttaaaagtctggaccagattatactctcaacatctgtttttaaaccttccctagtctgtgcttatgtgttttgttttttttttttgagatggagtcttgctctgtcgcccaggctggagtgcagtggcatgatctcagctcactgcaacctccacctccttggtccaagcagttcccctgcctcagcctcctgagtagctgtgattaaaggcggacgccaccacgcctggctaatttttttgtatttttagtagtgacggggtttcaccatgttggccagactcatctggaattgctgacctcaggcaatctgcccaccttggcctctcaaagtgctgggattacaggcgtgagccaccgtgcccagcctatgtggttttaaattaactttttctagaatctactaaggtttactcagacctttagcaggtgttcttggatactgactaggcccagagtcctcttctcatcaatttattggcaaatacactcacttgcgatgtgatatgagaccctgagttttacctcccaaatggcaggatgtctgttttgagagtttcctggccaagtggtggaaagtaccatggaaatggagttcttcattgcttcttacttaacttgagtttggaccatagagaagtcattcttgtgtggacctcagtttactcacctgtacagtataggatggactagatgatctaatggtcaggggactggcaaacttgttcttaggttaccaattagtagatatttcaggttttgcaggccatctggctctgtcacagctgctcagctctgccctcatagcaggaaagcagccatagacaataagtaaacaaatgagcatggctgctttctaataaaactttatttacaaaaacaggctgtggctggccatagtttattcaccccatttttgagctcttgacattcattagtctgtgatttcgataattcgtttaggaaaaaggctttgagttttacaaataatgcttctgaaaatctagtaaaacctttaaattttatttttgcttcttctctttatcaggaaagtaatgtagaacatttagaaaacccagaacattaatattttggttcctctcattagttaaccatctttgtgtaaacatgtgtatgtacatacttttttttttgagctggagtatcgctctgtcacccaagctggagtgcagtggcacaatcttggctcactgcaacctccacctcttaggttcaggtgattctcttgcctcagcctccagagtagctgggactacaggtgctcgctgccatgcctggctagttttttatatttttttagtagagacgaggtttcaccagcccaggctggtgttgaactcctgagctcagtcagtccttcctccttggcttcccaaactgttgggattacaggcgtgagccaccacacccagcacatgtgtgcatacatactttttacaaaattggaagaagtataattcatttgctaaatattttcacttatgccatgaaatcagattttatctttgtgtataaaaatacctgctctgctggggcttctagttgaaaactaatgaattttaaaaattaatttagtatttagccacctattcttttttctaattgtttcttgtagcttttgctttgattggaataattttactctaggaataaagttgtgtcatctgcaaaaatgaatcatatgtacacatctgattttcttacatttgtatctcctttttctcttcaaattacattgccctctaccattgatgggaacctgggtaataaaaaaaaaagaaaaaaaagaaacaaattgcattgtgtaccacctccaaagcaatgttaaatgttagttataacgataggcatcttagtatgctttccgaatttaatggaactgatgcgaatatttcatggttaactgtgggtttgagaccttcaatgtgttgaatgtattcacctggttctcttttttttcctaagtttttttttaaaaaaaaatcagctatggctattgtattttgtcacatgtcatcttagcatcttttaagatgatcatatagtttttctcctgcaagctacatattaattactgtggtgtatattcatagaattatattagatcttataatattgatccacccttacattcctgcagcaaacctctcttgatcctactttttcatgtactgtttgacttttaaaaaggtattttaatttttaaatagtttatacatgtacagtgcataatgtatttgagattcatctatgttgttgtgtgtatcagtagtttctttattgctgagtagcagtcccttatatgagtgtatcacagtgcatttatccattcaatagttggatatttcagttatctctggtttttggcaactatgaataaagttgtcctaaacgtttccataatggttttgtatgaacacaatacttgtttttcttgagtaaatacctaggagtatgatttctgggttgtatgtttatgagaaactgccaaaactgttttccaaagtagctgtaccattttgcattcttacctgcaagtgtatgaagagttccggttgccctgtatcctccctagtacttgatattgtcagttttttttttaaaagacaccttaataagtatatagtgatatccccttctggttttaatttgcttgtccctaatgacaaatggttctgagcctccttttatgtgcatctttttatttgccatctgtataccattttttatggaaaaatactgatttttttttttttttttgagatagggtcttgcttgttgcccaggctggagagcaatggcacagtcaccactcactgcagcttccacttcctagcctcaagccatcctcccacctctcagcttccccagtagctgggatttcaagtgcgcacctccacagttggctaattttttatttttatttgtagagatagggtttcattatgttgcccagactgatttcaaactcctgggctcaagcaatccacctgcctcggcctctcaaggtgctgagattacaggcatgagctgccatgcctggccaagataccaaaatctttatttaagatgtttaattgggttgctgctgctcctcttgttgttgttgttgctgctgctgctgctcctccgcctcctccttcccctcctccccccttcccccttttcctcctctccttctcctcttcctcctcctcctttctatttttttagacagtttccttctttcacccatgctggagtgcagtggcatgatcttggctcactggagcccgtcattccccgcctacccaaggctcaaggtgatcctcccacttcagcctctgaagtagttgggaccacaggcacatgccactatgcctggctaatttttgtatttttagtagagatggggtttcactatgttgcccaggctggtcttgaactcctgagctcaagcaatccgcctgtctcggcctcccaaagtgctggaattacaggcatgagccaccatgcccagccaatttcttattattgagtagtaagagttctttatatattttggatataagtgctttgttaggctgtgtgatgtacatatattttctccctgtcagtgccttgcgtttcattctcttaacagtgtctttttcccagagcataagttttaaattttgataaagtctaatttaccactttttttcttttacacatctggggttcgtctaacaactctccctaatccagagcttgccagatttttttggtaaaaggtcagatagtaaggccaggcatggtggctcatgcctgtaatcccagcacttcgggaggccaaggcaggcggatcacctgaggttgggagtttgagactagcctgaccaacatggcgaaaccccgtctctactaaaaatacaaaaaattagccggtcgtggtggcacatgcctgtaatcccagctactcgggaggctgaggcaggagaatggcttgaacccaggaggcggaggttgcagtgagtcgagattgcgccattgcactccagcctaggcaacaagagcgaaaatctgtctcaaataaataaataaaaaataaataccactatttaatactaatataaaattagtattttatattagcagtaatataatactttttttgactagtgatagaatgacatatctttttctacccttttgcttttaatttatatatcatgatattcgtctattgtttaatttgtgaaaataaagatggggttttgccatgttgcctaggctggtcttgaattcctgggctcaagcagtccacccacctcaccctcccaaaatgctgagattacaggtgtgagccaccatacctggccatatcattataatttgaaatggtttcttgtttgtttttcttttaaatttaatctgacagcctcttttaattaatgtgttttggaccatttacatttaatatgattgataatgattggatttaggtttcctattttattatttgttttctgattatctcttttttgaggggtttcttctgtttcttttttctgcctacttttggattaattgaatattttttagtgttttattaattggcttttggttatatctgtgctatgtttttgctgtaggaattacaaaatatatacctaaactatctacttagagttagcattttacctctaaataaaatgtaaaataaaacgtaaaagtattgcaaccatacaggtttctttattctagcgcccctcccttatgttataattgtacatatgtgtatatatctttatacactttcaatatatgtagatacatatagatatgtatctacatatgctttcagtgtatatctatatgcatacattgtatatatacatagacatatatctacatacattgacagatatatatctacatacatatacaatgcatgcatgatacctttggccactacatccttcttaaatttcctgttgcaactcatgactcaatttccttgaccagttactcctccttcagacatccctcttacatgtgatagtcctcagcatttagtttccccaactttcccctaattatcagttgtctgagttaccaccataatatcaatgacttctagatccacttttcttcttagacctctcctctaaactccagttatgtatttccaactttctgtgctgtcccagataaactccacattgtaggaaataaaaagaaaggagttataaaagtttaggttcaaagcaaaatttagaaactcacaaacgagacaaagattttttgatgacaaaggctgtggtccacaatgaaaatataaaacatgtctctataaaacatatatgtgatagagactgtccccaactttaagcctttcagtaattcatgtaactgcagaacatctttaaagtactgagagaaatgtcaatccagaattctgtatccagcaaaaatacccttcaacaattaaggccaaaaaaaaaaaaaaaaaaaaaagacatttcagatgaagaaaatctaagagaatgtgttgccaaaagttctgctgtaaaataaatataaaagaaggtctttaggccaaaggaaatactagaacttcagagataaagagcaacagaaatggtatctgggaaaatgtaaaaacacaaacagttgtttcttaagctctttaaaatatgtatagtggtttaaagcaaaagttataacactggtgagactttcaatgtatgtagatatatatgtagatacatatatctatatatatgtagatgtatgtagatatatacctatatctacatacatataaatatatatctacatatatagatacatatagatatctacatacatctacatacatgtagatgtatgtagatatatacctatatatctacatacatgtaaatatatatctacatatatggatacatatagatatgtagacatagatacatatagatatatatctacatgagattgagtctagctttattgcccaggctggagtgcagtggtgtgatgtcggctcatttttgtatttttagtagagatggggtttcaccattttggtcacactggtcttgagctcctgacctcaagtgatctgccctcctcagcctctcaaagtgctgggattataggcgtacctggccttacatgagactttgaatgtatgtagatatatatctagatatatatatagtataaatatctgtatatatctagatatatatacagaagatatatatctagatatatatgtataaatatctgtatatatctagatatatatacagaaaagcttagttaatgtctctgtagcacctttactatagagcagttctatcacctttgggtgtgagggtggtcttttgtgataatgagatttttaaattgtctggagcagttgtcttttttttttttttttttttttttttttgagatggagttttgctcttgttgcccaggctggaatgcaatggcgcaatcgtggctcactgcaacctccgcctcctgggttcaagtgattctcctgcctcagcctcccgagtagctgagattacaggcatgtgccaccatggccggctaatttattattattagtagagatggggtttcaccatgttggtcaggctggtctcaaactcctgacctcaggtgatccacccacctcagcctcccaaagtgctgggattacaggtgtgagccaccgtgcccggcccccgcctttttttttttttttttttttttttttaagatggagtctcactctgtcacccaggccggagtgcagtggcatgatctcagctcactgcaacctccgcctcccaggttcaagtgagtctcgtgccacagcctccggagtagctagctgggactacaggcatgcaccaccatgtctggcgaatttttttttttttttgagacggagtctagctctgttgcccaggctggagtgcagtggcgcaatctccgctcactgcaagctctatctcctaggttcacgccattctcctgcctcagcctcccgagtagctgggactacaggcgcccgccaccacgcctggctaattttttgtatttgtagtagagatggggtttcaccgtgttagccagtatggtctcgatctcctgacctcgtgatccgcccgccttggcctcccaaagtgctgggattacaggcgtgagccaccacgcccggctaattttttttttctttttttttttttgtatttttactagagacagagtttcaccatgttgcccaggctgggctcaaactcctgagctcaggcaatctgcccatctcggcctcccaaagtactaggattgcaggggtgaaccactgcgtccagtctgttgccttacagtatgtctcaccatttggatttatctgatttttttatttattttttttgagacggagtttcactcttgttgcccaggctggagtgcaatggcatgatctcggctcaccgcaacctctgcctcccaggttcaagcaattctcttgcctcagcctccctaggagctgggattataggcatgtgccaccacgcctggctaattttgtatttttagtagagacagcgtttcttcatgttggtcaggctggtcacgaacttccaacctcaagtaatccatccgcctcagcctcccaaagtgctgggattacaggcatgagccactgcgcccagcctgattgttttttacatgcatagattgagtttagtatacttgtgataggaatgctgtataagtgcacgtctcctcctcagcacatctcatcaggaggtgcaccatcaatttgttccattattgatatagatcacttggtaaaggtgacatgtgctagaatcatccctgtaaaggtatctttcacctttgaaagtagtatttatctgtaaggtgattctttgagaatatcctattgcccaacaacctttcacccagtagttttaggatctgttgatggttcttgcttgaatcagttacacctctgattgcaaatggtgacttctctatttctatcatttctttgttaattatctggcatttgaagacatctccctttcttcctctctccctttggagtcttactgaagagtggcctcgagttcttttattattcattgtgaaaaacaagagggcaggcatggtggttcacgcttgtaatcctagcacttggggaggcccgaggtgggaggattgtgtgagcccaggagttcaagaccagcctgggcaatgtagggagaccccatctcgacagaaaatttaaaaatcagttgggcatggtggtgcatgtcttttgtcccagctactcaggaggctgaggtgggaggatctcttgagcccaggaggtgaggctgcagtgagctatgatagcaccactgcactctagcctgagcgacagcaagattctgtctcaaaaaatatatatattttattttatatatatttataactatgtatttatataaatgtatataataaaaaagaaaaacaggggatctttatgttacagtttttgagcccacattttaggaatgtttaccaaactatcctagagccatacttacttggggaaaaaactaaagaggtatatgaaagctatttttatctttcaaaggctaaaagacattaaatgagttcttaaactttttcgaagccaaaatttttctttatcctgttttgctactgaagcaaaattttttcttgaatatagggtaacattcactagtggttgatgaaccattgtatttagtggcaatcttctgtaaataaatctttcaaatataaaagaagttatcccattaaaataattataaaatagtccaaacattcagaaaagttttaaaaatataggctgggcatggtggctcacacctgtaattcccacactttgggaggttgaggtaggaggatcacttgggcccagcagttttagagcagcctgggcagcatagaggatactgaatgtattttagctttgtgttgacaacccagtgggttatttgaacttcacttattgtgtggtagtccctagatgtatctctagaccagggctgtccaatagaactttttgtgatgatggaaatattctgtatgtgtactgtcctgtatggtagccacgagacacatggctattaagtaagcacctgaaatttttgttcaggtctcatactttataacattgtcacttcactgatttgtctcctttatctgtcatttctcccacctgcacaataggcacttgttatttctcaaattccctttcactgagaggtcaagtcaggtggtttttaacaatatgggaggaagtctaatatagtagtaaagaccatagcttaggacttgtgtgggtttgtttgtttgtttggagacagggtccctgtcgcctagggtggagtgcggtggtacagtctgggctcactgcaacctctgccctttgggttcaagcaattctagtgcctcagcttctggagtagctgggattacaggcacacgtcaccacacccagctaatttttgttattttagtagagacagggtttcgccatgttggccaggctggtcctaaactccggacctcaagtgatccacccgccttggcctcccaaagtgctggaattacaggcatgagccaccaagcccagctggacttgtgggtttgttgttgtttttttgttttatttgggacctgtgttggttgtaactcttagtggtactggctgtgaccttggacaagtcatttagcctctctataaacatctttgaaaggaagtaataatggtatctattttatggagttgatctgaggataaaaataagataatgcactttaaaatgcttacttagcacaatgtctggcaaatagaaagcactctctaggccaggcgtgttagctcacacctgtaatcccagcactttgggaagccgaggtgggtggatcacctgaggtcaggagttcgagaccagcctggccaacatggtgaaaccccatctctactaaaaataataaattagccgggcgtggtggcacatgcctgtaattccagctactcgggaggctgaggcagaagaatagcgtgaaccggggaggcagagcttgcagtgagcagaggtcgcgccactgcactccagcgtgggtgacagggtgagactccgtctaaaaaaaaaaaaaaattatccgggtgtggtggtgggcacctgtaatcccagttgtttgggagtgaggcaggagaatggcttgaacccaggaggcagagcttgcagtgagcctagattgcgccactgcactccagcctgggcgacagagccagactccgtctcaaaaaaaaaaaaaaaaagaaaaaagaaagcactctataaaagctagctgctgatttttatattattactgacacagaagatagggattgggggcaaatggaatgtactggaagagcataaccttgttcagtaataacgttaatgctagattgggacactattccacatgaaaaggtgaatccttgttacatttgacaactaagtttcataatttttaaaagatttcaatgcatcacaggttatttcttcttgatgtgccattcatggtttatatatatgtaacagtagattaaataattagattttattagttctggagtattaacttcggctggaaatgaacttcccccttctctataccaataccgagtgaggccactttctctcagataccaatcagaaataaggggacaatgttacattttttccttctagaaacacacattatatagagagttgccttttgaggtctagaagtctgaaaacactgtaaattcttttttttttttgaattagtacaataaatgtaggggtcaactctaaaaaatcgacagtggtttctgggatttgatcttggcatgactttacccctgcatctctgccctcggcaggtagttttgtttatgggtgtcattggttgaacaaatatttttttagttgctacaataactaaaacatgatctgtcctctaaaggagtcaacaaatgagccagggggcatgagtaattgcctgtaatataattgtgctcacgctgtcatggaggaccgtacaaagtgtcagaagcacagcacctggaggcacagcaaagggtagtagaggtgacatttgagcccggccttgaaaactgtctagggtttctcagaatttcagcaaagtaaggcaatttctgtctaaaatatgtaggcaaacttttttttaaaattaaaaatatgagaaattaattaacagattatgactacagtgcgtatttaaaaaccaaggcatgatgagtgctgttgaccagttcatccgaacagttcagagaagagaacatccatgtagatcccttttgtgttacagaatacaaaggagcagaaaattttgtctcaataactgccaggtcattctaattagaatacctatacattgtaacataattactccgtcgaggtaataagctatcaggtggtccagagtttgccattcagtcaggaaattcactcccttaacctagactgtgctggaaattcattgacaaattttgttctttgattctccatttttcttcagaattcatgcagaccacttgacttccttagcagtttcttttgtgggcgtacattaatgtctttggttaagcttcagcttccctttgcatcaatcctgttgtaatcgtgcctcctgaggcatctttttgcttcccttgcatgagtttccaaaaccctttctgcttggtaaggggagtatccattttctttaaagtagtggttttcaaacttgccgcacatcagaatcatttggggagaaggataaaaatatagattactgagcttcacctggggttctgtgaatttgggttgcatttgagattacttttaacaatttaccagatgatttttgctgcacctccatttcagggcagcttttcaaacttcagtgaccatataaatcacctgaagatcgtgagaaactgcagatcctaatttagtaggcctgggcttgggcctgagattctgaatttctctcaaacatgataatgccagtcacttgtcgagtagcaagttttttgttttttattttttgtttgtttttccagtattttcatgacattcaatgaatagcaaggtttgaaggtaacttctggaatttcatctaatgtgtattaatttttacttatctggatcttagggaaaataacctatcaggatatagggaggtgtttctcagagtatggttcgccagaacagcacaacctgggaattgttagaaatgcaagttctcggctgggcgtggtggctcacacctgtaatcccataactttgggaggctaaggcgggtggatcacttgaggtgaggggtttgagaccagcctggccaacatggggaaaccccttctatactaaaaatacaaaaaaaattagccgggcatggtggtgggcacctgtagtcccagctactcgggaggctgaggcaggagaatcacttgaacctaggtgacagacgttgcagtgagctgagatcgtgccactgcactccagcctgggcaacagagcaagactccatctcagaaaaaaaaaaattcaggttctcagactctattctaggcctattgaatcagtgacatatgcactctgaagtttgagaaccactgttttaaggcttctcactgtagtcctgtatttacttacgtagaaatcaaaacacatttctaatgttgtcagataatgcaaggatatcattttcttgtgtaagtgcatgggctagcactttcaaaactactaattcttgtaataaatgtttatttaatagcttattatatgctagccactacttaacattggcaaacttaaaaaatccctgtcgttaaggagattatattctagtggtgatattaactactagttcatgtatgtattcatccgtaagtagtatataaactgtatttccatggttttatattgtaaaacttaacttttcttttgcctcatggtgtttttgtttgtttgtttgttttctgagacagagtctcgctctgttgcctaggctggcagtagcatgatctcggctcactgcaacctccgtctcctgggttcaagcggttcttctgcctcagcctcccaagtagctgggagtacaggtgtgtgccaccatgcccagctaatttttgtatttttcttagagacggggtttcaccatattggccaggctagtccggaactcctgacctcgtgatctgcccaccttggactcccaaagtgctaggattacgggcatgagccactgtacctggccctgtgtttttgtttttaagattgatccatgttgatatgcatagccctaaattactcaaaattgatctacagaattctatccaatgaataagccacaatttgactgttttcctgttgatggacattttggttgttttcagcttggttgattgtttctttgcttttataaacatattaaatgctctgcattgttctgtgtgggaaacatgctaggggagaagaaaagacacacacacaatacctttaagggtaaacaagctttatcccatgtaaatggcaatgcagatataataaacaaatgatataataagcaaattgatacaataagcaaattgtaatggaaagaggagaagggaaaagaggtatatatatttacactcaccagactatggaggattcatcaccagactgggaagcaacagcctgggctccagagtcggccacttatctgtgcacagacaaggagaggtctcatgaagcttcggcagagtctgggaccctagctctttttgtaacgagttgtttggcatgaggtccagtcacaaggggccttcgtgactgggctcaaggaacacaaaaaggtcaacttgtttttgcgattttctgcttttttttttttttttttaataaccaccatataggaatagactgaaatagagatttctctgaaacagtgctggatgaacgcctcaaggggctcacacaaccttttccaagacttggtgaccattgtttgtgtgcacgttcaattgagttcagatttaatatttaacttttcctccacatgcgtatgcataaggatagtttctctagagaagtgtttttctaattgtgagctgcaagcagcatgttttaaaagtagaaagagaatagaatagaaaatgttggtaggagagaagatattagtataaggcatgtagtgagaatagtgttttatagagcttttgttttcaggggtatgtgtactggataagatgtaaaatatatttcttactttggttgtgggcaaacaggtgtgcaggctgttcagttataagcagaaccttaaacttgacaatcctgaatttctctctgaagttgtgataccagtttacagtcccagtggtggtatactggtgtttccattgttttgcatccttcccaacagtttgtttggttaaactgttaaatttttttccattgaggagtctgagaacagttatctcattgtggttttactttgcctttccttgctaactagtgagattggggtccttttttttttttaatgcaggaaaattaatataattcacctggtagagagataccagattagtgttgaaattgataatgagtgtaatgctcagtggcatattctaaatacacttctgtgaagaagtgaaatgacttgacttgctaatactaatgattgacagttgaggggcttaagtggtttaatttaatgtcgttctctctttaaacactgtagtctatgttcaattctataaacttgaatctttgaatttagtataatgacgttgtatttatacaagactatgagtagtcattagtggcagcatcattttattgatttgagtattaatatttttatatttttatagatacctgtccaattttttcttttaaaattttataacgaaaatacatgtatgaattattttttaaagtataaaaaagtaaaaagaaattagtcttcttttcctgtcccccgactctccccagaagcaagtactataaaaagattcttatatgacctcttagatatatatataccttatcactatccccttgccctcctttttatttttagtttatttattcaaatgacattctattcattgttctgtagctgttcattccttctgcttaacactgtatcttaaagattgtttcattttaacacataggaattttaccactactgaatttgattccattctgtagatgcatcataattcatttgactatttatgtatatttagattaaaaagaaaacccacataaaaatttcagcttttgtaaactatattgaattaaatattttgtacttaaatgaatgtgtgactacaggataagttccaggaggtggaattacagggtcaaagggacatacattcagatagatgtttgccaaattaccttctaaaaatccaaccaatttatactctcccaaaaatagatcagaatgggccgggtgcggtggctcacgcctgtaatcctggcactttggcaggccgaggtgggtggaccacctgaggtcaggagttcgagaccagcctagccaatatggtgaaaccccatctctactaaaaaatacaaaaattagctggggtggtggcgcctgcctgtagtcccagctactcaggaggctgaggcaggagactcacttgaacttgagaggcggaggtcgcagtgagccgaggtcacgccaccatactccagcctaggcgacggctgtaggtgattaaatgagatagatacgtttgttaaaaacaaaactctcagttatttatattgatacatttatatacttacatatgtatatctggacatcacatctcataattggagaacaggtatctaaaaagttgtttaactgactgttaagaaatgtagtctgttgtctgtttcctaggtaagccacttttcttttcccccagcattggaattcttctcttttctcctcctctgcacttccttcctttctgtcttcaccttgagcccatgcttcgctgtggaactccacttaggaggtacttctgacaaaaaaagaggtctgcactgggaacttcgtgtctggttgttgacaggcatttctgtattgcagctgacagtgtgagatctattgcccctactttgtgctgtgtatcttatgtgtaaatgttttttctcatttatattcttgtcaaatcattcacaaatgcagttatttattattattattattattatttccttagagatccttgttctgacactgttattttttaatcatgattacctgtgagcctgttaatctctctaggtaattgagaactgattataatttataatttttttacttctggtttataatctaatgggaaaactttgcatttagattttctatagatttaaaaattagagctgaatcattgcttcttcgtattattttaacttgacaattattaaagaaatgtacttatgtattttaggggggtatatgttcaaataggaaatttgtagaaatgatgtaatgtattgatttgtaatgatgtcacgtctttatctacaggtaggcgaaaaccaagagtacatcggcctcgttctcctatattggaagaaaaagacatcccgccccttgaatttcccaagtcctctgaggatttaatggtgcctaatgagcatataatgaatgtcattgccatttacgaggtactgcggaactttggcactgttttgagattatctccttttcgctttgaggacttttgtgcagctctggtgagccaagagcagtgcacactcatggcagagatgcatgttgtgcttttgaaagcagttctgcgtgaagaagacacttccaatactacctttggacctgctgatctgaaagatagcgttaattccacactgtatttcatagatgggatgacgtggccagaggtgctgcgggtgtactgtgagagtgataaggagtaccatcacgttcttccttaccaagaggcagaggactacccatatggaccagtagagaacaagatcaaagttctacagtttctagtcgatcagtttcttacaacaaatattgctcgagaggaattgatgtctgaaggggtgatacagtatgatgaccattgtagggtttgtcacaaacttggggatttgctttgctgtgagacatgttcagcagtataccatttggaatgtgtgaagccacctcttgaggaggtgccagaggacgagtggcagtgtgaagtctgtgtagcacacaaggtgcctggtgtgactgactgtgttgctgaaatccaaaaaaataaaccatatattcgacatgaacctattggatatgatagaagtcggaggaaatactggttcttgaaccgaagactcataatgtaagtaaatctggtcttaattttttgtatgcatttaaaattagactagtttccttcgtgattgatgtagcagagctatgctgttgatgtggtataaacctttgtaacttaatagttatacagttaaataatttcttaattgaaggaatatgtgcattaaaatagcttttaagaaggtaaaggaaacatatatgaaagaagcaaaattccattgttttttgatgcctaggctaggaaatagaatgtttctagttgggactgggcacagcagctcacgcctgtaatcccagcactttgggaggccaaggtgggtggatcacctgaggttgagagttcgagaccagcctggccaatatggtgaaaccccacctctactgaaaatacaaaacttagccaggtgtggtggcgcacacctgtaatcccagctactcaggaggctgagacaggagaattgtttgaacctgggaggcaggggctgcagtgagctgagatcacaccactgcattccagcctgggtgacagagacagattctgtctcaaaaataaataaataaacaaaaagtttctaggtggaatgccactgtgggcctgtttttggttatgttcctctatagcctagctcagctcatccacccttaactttggtgttagggttgttttacttcttttttggttttaccatatctgtatgtaaaatggaacagcaagaaaatacctagttgtctaaggaaaggtcagttctgccattattggttggaatcccccaggagaagatgatcccaacagactgagggtcatagtctggcctcagtgttcctgagggtttcgagaagctcttctgggaagcctgtgggcgaggtcaggagacagtctcagggtttacctcagtcagggcatcaggcagggttatagtgtggactgagtatctgacatcctgtagatatatggtcagagggatgggctactttgtgtcttcagcttctgaagtcttcaaagccctcttccagttcttagaattaggtcaaatgaaaaaatctggtaggatgaaatgaatgtcagagcagggcatggaaaggagagttgaaactttatcagtgtgctgtcgagaggtctgaatccacaccgattcttgattctttgtggctggaagcttacggaatcttcgctgtctatggtgttctgcagttttacagtgatacgcccttgtgtgggctgctttcatccacgaggtatttttggtgggcattttcaatctggcaattacgttctttgattctgagaacttctcttgacaacttcctcttttccctcttgtatttatcttgagctatgattttattgaacgttggacttcctattttggtcttctgactttcttatcatttctctccagttttcctctttgtctctttttctctttggggtatttgtatgtgttcagttttttaagatttccttatcttggtcgtccaaccctgttatccagtttttcctttctgctaccatatttttattatctaagagctcttttgtttttagaatcttcctttaaaaaaaatagtaaaatcctgtttctgtgtcttggatatagtattttctcttacctttctgaggctattaatgacaggtttttttctctcctctgtgcatggtctgtttcttctaagttgctttttcctattctttgttttggtttttctatttcatattcagatgtttattaattcttaattttctgctcctcattaacattgtggtactatgtagccagttggaagctctgagcaagtgggtgggccttatcaattttgacttaaccattggatgattttcattgtcttttttattgggggaaatccctcttgtcagtatcttgaggtctgtcctcgagagtaagctctagaggagcaatggcatggaagggccttttcctgtgtcctgcttgaagcatgaaggtcttgctggtggtattctggtggctgagtggtggaagaaagcttcatttattgtgcacacagcatttactacttgtattgtcacttaaatcctcagttttttgtacagtacctttgttcacaactgagcgtggtttctgccagtccagggaacctcagtttacctcctctagagactagacctttggcagcttgaaggggagaatggtggtttaggaatctgctccagccagttccctattctagagacacccctccttgttatcattgcgttttgaggattgtgttctcaacttcaccttcctttttagtttgagatcaggctttcttgggtctgctgaatcagtaatcacttgttcatctactttaaaatctttttttgttgttaccatgtctcccctactttatccttatgagttcgtctttaacaatttttttttttttttttttttttttgagacagagtcttgctctgtcgcccaggctggagtgcgagtgcaatggcgtgatctcggcttactgcaagctccgcctcccgggttcacaccattctcctgcctcaacctccgagtagctgggactacaggtgcccgccaccgtgcccggttaattttttgtatttttagtagagacggggtttcaccgtgttagccaggatggtcttgatctcctgaccttgtgatctgtctgcctcggcctcccaaagtgctgggattacaggtgtgagccaccgtgcctggacagcagattttttttttttttttgaagacaagatctccctttgtcacccaggctctggagtgcagtgacactatgtcggctaactgcagcctcgacctcctgggctcaagcagtcctcctgcttcagcccaccaagtagctgggactacaggtgtgtgctaccatgcccggctaatttttgcattttttgtagagacagggtttcaccatgttactcaggctgatctcgaacttgtgagctcgagccatctgcccttctcggcctctcaaagtgctgggattataggcgtgagccactgcgtctagactaacaatatttctttcttttttttttttttttttttttgagacagcgtctcactctgttgccccggctagagtacagtggcgcgatccttggctcactgcaacctccatctcccaggttcaagcgattctcctgcctcagcctcccaagtagctgggactacaggcatgcgccaccacacccagctaatttttgtatttatagtagagatggggtttcaccatattggccaggctggtctcgaactcctgaccttgtgatccgcccacctcagcctcccaaagtgctgggattacaggcgtgagccaccgtgcccggctaacaatatttctttagcatggttttaagaaggtttcaggagggaacaaaatgaaatctgtcaccttaacccagaaactgctgtgagaaacaatacttaaggttttaaatgtatattctgtgtcttttggtttggatcagatattttaagaaatatgtgtaaaatatgtgtaacttttttcttttcttgctcccttacctcccaaacatctggtcatggtattcattgtgccattttttgtttttgtctttgttttgacattttgctgttgaggtggtaacacggaaacctttgtcagcaaggtcattccaaatggtgaaataactgtaaccacatttttaaagtttaaagtttactgctctcaggaagctgaggcacaggaatcgcttgaacctaggaggcggaggttgcaatgagccgagatggcgccactgtactccagcctgggtgatggagtgagactctgtctccaaaaaaaaaaaaaaaaaaaaaaagtttactgctgtgttgtcattgtaagtggaaattcagtgatgctgcctgtcagggagcccggtgcttgtactctgtatagacattcagcagttagcaggtcacgttcacgcagtctcaagtgccctcctgaaaggagctcatagtcatcaggatggctgggaacaaattaggaagtaagtgaaatttagtccatgctccaattctcccattcctgtgccttcctttctgtgctgcttgtccttaccctttggatattcactctcactgcctctttctttccctgtgctgccctttttggccagatacagaccaaaggtgtcttgtccacatacagaaaaaccttgacatctttaaggctcattacacagtaatcagtggtataggtcttagtttcagagacctgtaaaatgaagtagttgtgataagttagtaacagccaagagcaacatttattgagcacttcatgtgtgcctcacagtgtcctaagcattttatgtattttaaaattaatcctcccaacagcccaataatgtaggtactatattttttaattattattttatttttaattaattaattacttttggagacagggtctcactgtcgcccaggctagagtgcagtggcatgatcatggctcactgcagcgtcagtctcctaggctcaggccatcctctcacctcagcccccctaggagctgggactacaggcatgtgccaccgtgcccagctaatttttttattttttattttgaagaggtctcactgtgttggccaggctggtctcaaactcctgggttcaggcaatcctttcacttcagcctcccaaaatcatagggttacaggcctgagccaccatgccctgccttgcaggcactatttttgtctgcatcttatagataaagagactaaatctcaaagaggttaaataatttgcccttgatttgcccaagaccctgtggctcttaggaggtagaacctggaattttttttagaatgtgttttataagaatattttcaataccttattttatactgtagtctagttttcaaaccttcttgagaaatctgcaacttgcatcgttttagctgttaaaaccaatgcttataacttggggagaaagatactataatggtttctgttatatctgcagtgagtatttatgaaatctttaaagatttgaaataaaggcgtttttagaaaatctaaactaagtggcaatttcagaaaagttctgtttcctaatatatcagtatcagtctacgaaacagcattcagggaagcaaaatatatactattcgataattacataaatgcagacctttgaaatcacgtgactcagatgactttttaagtacctgtgggtgattttttgatacattgtcgaggaaatcaaatattttatttttcttagtggaacagtaaaatacttatgtttgtcaataaaactgttcatttaagtttatttgctttaaaagctatggtcgtcattcaaattgccttttttgatgcataataaactgcacagattttaaagatgatttcaggcaaataggattatctttttccatgctgtgatattttgagtatttttctatgtaaaatcaagtaggaaactttaaacatagtgatatgtgtcaacaattttgacaaatctgaaagattttacatcttttatgaaaatgagattaaaataatttcagtttaactgtacttttgtggtagattatatgtggactcctcatgatagttttaaagccatgtagaattttcacgcagtttatagtatgcagaggttttaattgtaatgttaccaatttatagaaattaagttttctgttattgcttttatttaataagtgcttaaaaatatgttatttgtatagattagtgaagcttataataaaaaaagcttcttatacatgaatttatagtccatctgagaagccaagacatattcagcatataactcagaggccagttttcattcattatgtaagtgggccaatctttcttaactattgcttttatcctgtcaatcctttgctctgaaattaggacctactaaaatagaaattaccagattagattagcatgtttttctgtcactctccattctaaatataattacgtgaacacagcattatatttcatttttttgcagagacagagtctcactatgttgccaggctggtctcgaactcctgggctcaagtgatcctccagccttggcctcccaaagcgctaggattacaacaggcgtggaccaccacacgcctttaaacagcattttaaaaatctgtattcattttccgaatcaactaaactatgcttttaaatctatacagctttctactccccattctaggtacaaaccacatattaacttactgacttcccgtgcctgaattccttctgtccacgttcagttctgtatgtccagcagactcctggacctgtccgcaaggcaggcacctcaaacgtgtttaaaaccaaactcatcgtttccccccattacctactcttcatccagcgttctcatcttagtaaatggaattactgtcccaccagctgctcaagctagaaatatgagaataaactttttcctttattgtttgctatgcctttaaaataaatattgaatcagtttctctccattcccactgtccctccgtgatacaagccagtgtcatcttcattagactagtcagtcacccctaaagtagtgtaaccccctaccccaaccttccaagattttttcttttttttttttttttgagatggagtctcactcaggctggactgcagtggcccagtctcagctcactgcaaccccctgcctcttggattcaagcgactcccgagtgggtgggattacgggcggccgccaccacacctggctaattttgtatttttagtagagacagggtttcaccatgttggccaggctgatattgaactcctgacctcaggtgatcagcccacctcagcctccaaatgtgctgggattacagatgtgagccaccatgcccagccatagctggatgatttttaaaacagcaattttgatcaagtctccttttcccctaagttgaaaaaccttttaattacaattacttccatttgcccttaaccaaaacttcagattctttagcacagatccctaactttgtacatttaattatcttgctttctaacacttaagacaacataaataaaaagcaaaccaaagcacctaaaaacctgttggctaactagctcattcttgaggtctcagcctatttatgctacttcctagggatttctttgcctgcacccctttctttccctgaacccctttttctcttgcatcgtgaaatactactttttaaaacacccatcctaccaatagtttttttgttttgttttgttttttgatacaagtctcactctgtcgcccaggctggagtgcagtggcacaaccttgcttcactgcaacctccgcctcccaggttcaagtgattcttctgcctcagcctcccaagtagctgggattacaggtgcctgccaccacacccggctaatttttgtatttttagtagagatggggtttcaccatgttggccagtctggttttggactcccgacctcaggtaatccacctgcctcggactccgaaagtgctgggattacaggcgtgagccatcgtgcccggcctagttacttgttttaaggtaaatattatacacttcataaggtgaggaaaatgatgacaactatgtatatgatacccatgaagtgctggtactactctaaacactttatatattttaattaatttaattctaacaacagcatcttccaggatatgtaccgtcaccctatttttcagatggagagactgaggcatagagagttttaagtaatttatccaagatcacacaactacaaagtggtgggatcgggatttgaacctaggcattctggctccagaatgtgtgctcctaagcactacttgggctgcttgaccaagagcttaggacctagcttttgtctttaattgctgaattgctagttttatcagtttcctgcagctgctataacaaagtactataccaaaaaaaagtactataaaactgggtagtttaaaacagtagaaattgattatttaacagttttggagaatagaagtctaaactcaaaggtgtcagcagggccatgctccctctgcaggctctaggaaaaaaatccttgcttttttttttttttttggccttttctagcttctagcaccccaagtgtccttggcttgctggcagcataattccaatctccctgtcactatcttttcaaggcagcttaggttttttctatcaagcacctaacagttcttcagcctcttcccattacccagttccaaaaccactttcacatttttgagtatgttagcagcagcaccccacttcccgtaccaaaagttgggagttttccagggccaccataacaaagtaccacaaatggggtggcttgaaaaaatatgaatttattgtctcacagtcctggaggccagaagtctgaaatcatgggtcagcagggttggtttttctggagactttcaaagagaatctgttccatgcctgtctcctagcttctggcagtccttagcatttcttggtttacaaacagacacatcactccagttgctgcctctatgctaccttcttttctttttcttttcatttttttgagacacggagtctctgttgcccaggctggagtgcagtggcacgatctcggctcactgcaacctccacctcccaggttcaagtgattctcctgcctcagcctcccaagtagctgggactacaggcacatgccaccattcctggccaattttttgtatttttagtagagatggggtttcaccatgttggccaggatggtctccatctcctgaccttgtgatctgcccgccttggcctctcaaagttctagaattacaggcgtgagccaccacgcccggcccattaccttcttttctatgtgtcaccttgggtcctctccttttctaaggataccagtcatttgacttaggggccaccctaaatccaggatgatttttatctcaagatccttaactttacatctgcaaagaccctatttccaaataagatcacatcctgaggttgcaggtggacatgaactttggggacattattcaactcatttcactagtgttctttactcttcatttctatgggtttgtttagaaacgaaagttgaaacttactgtgagtcattaaccttctacttagctagcctaggtaaaagtcaaagaagctttaaaatgtagacatataatatgtatgtttgctcttaattatatttttagcaaaccttttcttgccagtctgtcttctctttgccaccctatgagtccttgagaatgtgtgcccagtggtaacttcagggaagcctggccagtttgggtgagcctgaggaacatggtaggccttgtaagaaccagagcttctacagaaccacattataactccaaaaccaaatatacatacataatgtatatttatgtggaaagctgttgtcacttttacaatgaggacaaataattttgattatataaactgtatataggccaagtaactaagtataaaaaaacaacttttcagcccggtgcggtggctcgtgcctgtaatcccagcactttggggaggttgaggcgggcggattgcttgaggccagacgttcaagactagcctggccaacatggcgaaaccctgtctctactaaaaatacaaaaattagctgggcgtggtggtgtgtgcctgtaaatcccagcttcttcagaggctgaggcatgagaagtgcttgaacccaggaggcagaggttgcagtgagccaagattgcgccactgcactccagcctgggcaacagagtgagactccatcacaaaaaaaaaaaaaaaaaaggaaaagaaaaaagttaaacaaaacaaaacagaccaaaaaaacccccaacttttctttgaatggattagcaggtattcactgttttgctgctttatgctttaatgaatttttctttctgtggcttcaagaagaaaaatgttaggtcagtgaatacggtataggttgagtatcccttatctaaaatgctgtggatcagaagtattatgggctttggaatatttgcattatacttaccagttgatcattccttatttatttatttttttgtttatttttgagacagagtctcgctctgtcacccaggctagagtgaactggcgcgaactcggctcactctaggctccacctcctgggttcacaccattctcctgcctcaggctcccgggtagctgagacgacaggcgcctgccaccatgcccggctaattttttttgtatttttagtagagaccgggtttcaccgtgttaaccgggatggtctcgatctcctgaccttgtgatccgcccgcctcagcctcccaaagtgctgggattacaggtatgagccactgtgcccagccagttgatcattcctaatctgaaaatctgaaacgctccaatgagcatttcctttgaacggcatgttggcactcaaaaacttttggatcttggagcattttggatttcagattttcggattaagggaactccacccatatccttttatttatctgtgatttaatataggccttctttcttcagaattactgaatgacttattcctggaatgctgctaaatttttattcatttattaccttagtaataatatttaacatttattgatcactggtgtgcccaggcactgtggtagatgccttatcattatacctttaagtcttatagtggcctgcaggcaggttttattatatcttcattttacaagtgaggtaaatagaatggcttagagactcagagaggctgtgtcttgtccatgtccacatatcttacaagcaaatgagtgtatttaaagccagatctctcctaaagcccagttctttcagttccctcagtttgccattgagtaaacaggaaaatcaggctcactctcatcgagtgcctcacacatactcttgaattccttttgagtggggacagaaataccattatatgtgttcctctatgtctagtcctagacattaatttgcctgtttgttttaagttagtgaccatctctgttgaagtctttaactccattaaaagtgaatggaaccttaggagagttttaggcaggagaggaagctcctcttctctccagtttgggcttcgattgtccagaagtaaagaagagggatgagatattatttgagataactccttcaaaaaccagaacttagcaaagcatttacaccattttgttagaaatatttctaaactatattataaagttagctgggtatcgtggcacatgtctgtaagtcctaactacttgggaggctgaggcaggagaattgcttgagcctaggagtctgagtacgcagtgaaccacgatggtgccactgcactctagcccgggcgacagagtgagaccctgtctctaaaataaatttattttattctaaaataattctaaatacattcttctcatcatattgttacattgatgatcttaaagttggttgagatgtagctgaaactggcttccacaaagtactctcacgtggttctgaattttgaggttatttttctttgtgtcatgttttttagatatcatttctcagagtaaatcaagtttgagtgagacctgcagggttttcttgtgagcgcctatattgagttttagtgcataagctttgttttaagttttcactgggtagatgaactgtcagataagtggcattatgtctaacatataaagtatttccccccatttttaaacagagaagaagatacagaaaatgaaaatgaaaagaaaatttggtattacagcacaaaggtccaacttgcagaattaattgactgtctagacaaagattattgggaagcagaactctgcaaaattctagaagaaatgcgtgaagaaatccaccgacacatggacataactgaagacctgaccaataaggctcggggcagtaacaaatcctttctggcggcagctaatggtgagaggggcattttctcattttatttttgttaagtctgagctaaaccgttggtatgaaatcactgcaaaatttgaaaatagattaaaattttcaagtacagtcgtgcattgcttaatgatggggatacattctgaaaaatgtgtcatttgacaatgtcatcattgtatgaacatcatagagtacacttacacaaaccatacacctaggttatacggcatagcctgttgctgctaggctgcaaacctgtacgtcatgtgactgtactgaatcccataagcagttgtagcacaatggcaggtatttgtgtatctaactatatctaaacatttaaaaaggtaatacgtataatcttatgtgatcaccatcacgtatgtggttcctggtggaccgaaacattgtgcagtgcatgactgtgtgtatattttactttagttctccatatttcattttcccaagagaaccttgttcattccactgtaaattagggatgctatacattttagtgttttatttctgccttgggtcattactgatattccccaacatgttagtttgtttctttaattcaagtatcttattaaacttttttggcattccagtttttaattttaagaaataatattctttttgaactttttgcctttttaaaaaaataaaactttaaattttagagtatttttagatttatacaaaagttgcaaagatagtagagggtttccatatatcctgcacttggttgcccctgttattaaagtcttagattagtgtgaaatatttgttacaactaatggaccagtattgatacactgttactaactcaagtccatacttcattccaatttccttagtttttacctgatgtcctttttctgcctcatgatcctgtaccacttgatatttagtcatcatgttttcctctgggttgtcggtttctcagactttccttgtttttgatggccttgacagttgggaggagtagtggttaggtattttgtagaaagccctcattatgggtttttctcatggttagcctaggtttatgcattttggggaggaagaccacagaagtgaagtgcaattctcatcttcttatcaagagtgcatggtgtcctcgtgacttaccactgatgatgttaaccttggtccctgggtgaggcagtgttcgtcaggtttctccacatcctcccccaacccctcaaacccccaatactgtactttctggaagcaagtcactataaacagccacacttagcgggtgaggagttatgttctaccttcttgaaggggcaatatctacataaattatttggaatttttctgcacaggagatgtgtttattttttcaggcatttatttctatgagtatacattcatggatattttatacttactgggttataatataattggatatttattaggttataattcaatgtcaccttatttattttgttactcaactctttatttttttaagttataaatacatatatatctcaaaagtttaaatagtataaagggtatgctgtgaaaaatgaatctctctccttcaaaatctccaatctgaccttcctttctccagaggcaatcattattgctgtatgtttttttgtcctgccagatgtattctgtgcatgtttaataaataccacctgtgttttctaatgtagccatccctcagtattctcagggattgcttccagagccctctgcagatagcaaaatccatggatgcccaagtcctgcagtcagccctgtggaacctgctgatatgaaaagttggcattccatattcaagggttctgcatcctgagaatactgtattttcaatttgagggtggttgaatccaaggatgcagaacctttggccacagagggctgactatagtgccttttaagttttagcttagataaaattattaggtaagattctgaaagtacacttttaagtgcctggttctgagttctgctcttctgcatacattatctgctatacatataatcctattaattttccccattctccatttgcttaaaaatagaatgtttatatttaataaagatacccggatagctgtatccaaccttgttctcacatattctacatcaatattcctgtgaattcatgcgtatttttggagaatgataggctctcacatataaatactgttgggcacaaatatactttgtcttcagaaaaaagcattcttagttaccatgaattatatttattcatatctggtagttggaagtatttctctattagatctgtttagaaaaatgtgtaatttttttattagaaaagttttagtgttcagaagtctttgggggataagtaattgcagtaacacaatctccgtcttactctccccccatatagatcaaatcataggaaattttattaatttcagccagcttacttccccccttaatttccttttatgaatcatggcattaaaatagacaaatccctttttgctctcctgtgttttagtacaacaacagagaaccatctttagtcctctaaaaggcaatgtgagataggattttataaagtacattgaattaaaatatttttcagaataaaaaatagaaaaaacaaaaaaatattttctgtgtgttagattatgtatacagtataatcataattaaagaacaaagtcaaaacaggaatgggtaatcaagtgttaagtgttgtgatttgggggaatgtaaaaacctaaaaatgttaatataggggaattgataaatttcattatgaattatcatgtgatagaacactgcgtattggagaattaagtaaagtaccttgcaaaaactgtgtgagatacttaaattcttcttcctctaaataaccaactggatcaggttttatcattaaaaaataaccaattagcatagtagaattgtagttggtttccttctcatattttttgcatttcctacaatgagcatgttatatagttcagtatgattcagcatgtaatgtacttttaaaaattagttaaaccggcagggcacagtggctcacgcctgtaatcccagcattttgggaggctgaggcgggcggatcacgaggtcaggagatcgagaccatcctggctaacatggtgaaaccccgtctctactaaaaatacaaaaaaaaaaaaaaaaaaaaaaaaattagccaggcgtggtggcaggcacctgtagtcccagctactcggcagcctgaggcaagagaatggcgtgaacccgggaggcagagcttgcagtgagccgagtgagccactgcactccagcctgggcgacacagagcgagactccgtctcaaaaaaaaaaaaaaaaaaaaaaaaattagcaaaaccttttgtagtaatggggaacaacaaagagaacattgagctttaggccacaatatgttcttagaaagttagatgactaaaatttgtgtgctgtgagattgccttgcaacctgcagttatcctcttagtactacatggagtacatggaaataaggtgagttgtaccttggatttaatggtgagatctggaccccaaaaatgacataaatatttttttctttctttcctttttttttttttttcggctaaggtacaacatcaacctggtactgtaggaggagggattcacaagaattgaaaattgttggggaagagaaggggacacggacatttttgggtgcctcctgtgggccaggtgctcaactaggtgttttacaattctttaatcctctcagcaactttttaaggagtgtattggtaatgaattgagcattcaaatagaagaattcccgattaaaacaccagttcaccactgttacctttatttgttctctctggtaactaaaatcttggctgtgatagtcagtttaggaccacccagtccaggtaaatacccaaaataatatctaatcatgttctttaacttggggttttatgagatgaaaacaatggaaactactggggttctgataatagccaagaataatttacagcataacaggaatttcagaattgtagcctgtctgatgactttgacttgatgttaacctctcaaagaaaatgcttcatttctttttttttttttttttttttgagacggagtctcgctctgtcgcccaggctggagtgcagtggcgggatctcggctcactgcaagctccgcctcccgggttcacgccattctcctgcctcagcctcccaagtagctgggactacaggcgcccgccactacgcccggctaattttttgtatttttagtagagacggggtttcaccgttttttagccaggatggtctcgatctcctgacctcgtgatccgcccgcctcggcctcccaaagtgctgggattacaggcgtgagccaccgcgcccggccgaaaatgcttcatttctaatgtataactctctggtttttatctacacacacacgtgtctactttaggagagtttaattctatttttgatagttaaatttttcttctccatttttcctcaatattttattaaaaatttcaaatgtacacaaaagttgaaagaattatacagttaccagcctgatcaacatggcaaaacctcgtctttactaaaaatacaaaaattagctgggcttggtggtgcacgcctgcaatcctagctactcgggaagctgaggcaggagaattgcttgaacccagaggcagaggttgcagtgagccgagatcgtgccactgccctccagcctgggcaacagagtgagactttgtctccaaaaaaaaaaaaaaaaaaaaattatacagtaaatactcatatattcatcgtatagatctgtactttatatttgtaactaaatatacagcttactatatttgctttatcctatgcctgtatggtaattatgaaatgctttattttgcttatttgagggaagtttatttttagaagaattttttctgagtagagatggcttctaaaacctggtaggttaattctttgtttagttttgaaatgttcatgcaaagtatagaatatacttgttgatagaatatgcatatttagtatagatcagatacaatgtaattttctttcatcctttaatgtttttctctctgctgaacattttgggtctctttttctttttgttgttgttgtttgttttgtttttgtttttttgagacagagtctcgctctgtcacccaggctggagtgcagtggcatgatctcggctcactgcaacctctgtctcctaggttcaagcaattatcatgtctcagcctcccaggtagctgggattacaggcgtgtgccaccacacctggctaatttttgtattttaggtagagacggggtttcaccatgttggtcagactggtctcaaacttctagcctcaagggattcacctgcctcggcctcctgaagtgctgggattacaggcgtgagccactgcgcccagccctgtttttggtctgtttttcttatggctatgattgccatagttttttgaacctaaaacttgtatgaatgtatatatgtatatgtgtatttaacaatatagactatttgaaattagaatctttatagaaagtcagagaactatggtcatgcaacctgtgcttttcaaccaatttaaatggtctaaacttagtaggcaactaaaacaatttttttggttttattttcattaaatggcactgggaaagtagggaggatgtacaatgatttggttaagaaaagctataggatgtagttgtgtttgaaaatggccgggcgtggtggctcacacctgtaatcctagcactttgagacaggtggatcacctgaggtcaggagtttgagaccagcatggccaacatagtgaaaccccatctttactaaaaacataaaaattagccaggtgtggtggtatgcgcctatagtctcagctacttgggaggctgaggtgtgagaatcgcttgaacccaggaggcagaggttgcagtgagtcgagatcacgccactgcactccagcctgggcaacagagtgagattctgtctcaaaaaaaaagaaagaaagaaaaaaggaaatctgtgcctctaagaaaaacagataatcggtaactacattttctttttccaaataaagtgttctttaaaatataggaattaagggctgggcactgctaacgcctgtaaccccagtgctttggtaggccaaggcacgggggagttcaagaccagtctgggcaacatagtgagactccatctctattttaaaaaggattaaaaaattagccaggcgtggtgacacatacctatagttccatctactcgggaggctgaggtgggaggatcacttgagtctaggagttcaaggttacagtgagctgtgatcacaccagtgtactcctgagcaagagtgagactctgtctctaaaaaagtaaaaaataaatttataaaaaaggaaacacaaacccaaaaatccaagaggagtactgtggatatacatggtattaagtgtttcttatggcccggtgcagtggctcacgcctgtaatcccaacactttgtgaggctgaggtgggcggatcacctgaggtcaggagttcaagaccagccgggccaacgtggtgaaaccccgtctctactaaaaatacaaaaattagccgggtgtggtggcaggcgcctgtaatcccagctacttgggaggctggggcaggagaattgcttgaacctgggaggcagaggttgcagtgagccaggagtgcgccattacactcctgcctgggtgacaagagcaaaactccatctcaaaaaaaaaaaaaaagaaaaagaaaaaccgtgtttcttcttattcacaaatagcgtactctagttgataaatttatttttatgaggaaacagtttagcaattccgaaactattttactgtgtgtactaggaatgaacaaataactagatatgttatagataatgtgagccagatttctcactgtcagagaagttacagataagcaagtgggcaatggtaaatgaaccctatacagacacataggcattcactcatatacatatgtgcccacacaaataaatacagaaataatatagatgtatatatttatgactacattttttagctctgttggctgagagactctagaatagtaacaccccaatagtaacaaacacaccaaccacttagattgtgacttctaacatcattctccaatttgttcttcaaaaaagaacaaaggctccttggagagatggtggattgtagggctggggcagggaaaatacaaggtgagcccggagcatcttgtaatagtggaaagtaagaaaatgctggatggatggatggatggatggatggatggatggatatgtgtcaaaaggacactggactcggaaaaagtccccagtggccaaagctgaaacaatttgtgcaacaaaattaaaagtgatagtattgcatgataacccaaagaatataattaatatccatgagtgcgtactgatataccgtgtgttctgtacactgtggtccttctgtatcccgtggtctataacatgccatagtatcactctgtctaagttgaaagagggtaggtgtactaagagacttagtgactttcagaacaattaagggacttcagaaagaaagttgtttccaaaagggcctctgttttctctttttacagttgaggaaatgatggcctggagaggttaggtagcttgcccagagtcacacagctaatccaagtcagatttgcagtgggttttgggtttctaggttttgatcactgcagtgtgctgcccagactgtgggtctatgtcagcttgcagtttttgtcatctgtcacagatatccgtgacagatatctatatcaaggctatattttaaaaagataggctcattttactttttttaaaaagtagagcccataattagcatgtattatctagaggtgaaggtacaccaaattgattgaattctgtaaacacaattttgtttgtaatcttgatttttatttcataggtctaatgctttaaaaatacttaatttttcctctttaatagcttgtattgaaactcgtaagtgacatttgtggtactgttctatttggttatatataggaataatttttttgtttgttttacacattatagaagaaattttggaatccataagagccaaaaagggagacattgataatgttaaaagcccagaagaaacagaaaaagacaagaatgagactgagaatgactctaaagatgctgagaaaaacagagaagaatttgaagaccagtcccttgaaaaagacagtgacgacaaaacaccagatgatgaccctgagcaaggaaaatctgagggtaaaaaaattacttgattaaaaagaaatatttcattagtgttatttatgaaatctccagttttacttgcaaaatgaaagtgaaatattgcaagcagctacctaatttaatatttctaaagagatcaggataccgtcccctcttataacgtgtgtaacaattgtaatgagttttatgtattagtgaatttgctataatgttatattcatgtctctatttatacttcccattaagttgccatttccctatgaaaaagaactattctttaatattataccagagtatacacttttgtatgtgataaaatgttcatttttatattaattacttaagcattcttaatatattattaaatattcttaaatactctctgaattacctattgcagcaatatccgagaatctacttgctttaaaatggccgttcaatggaagcaggttttttgtgattatttagtagttgactgaatgtggccatttgccctgaagcaattttaaagaatatctttgaagttttgttgtgcattttgctgtagagccaacagaagttggggataaaggtaactctgtgtcagcaaatcttggcgacaacacaacaaatgcaacttcagaagagactagtccctctgaagggaggagccctgtggggtgtctctcagaaacccccgatagcagcaacatggcagagaagaaggtggcatctgagctcccccaggatgtgccaggtacagagggcagcgtatcaatgcctctgtaatggggggaatccttcccttttgtagtaaaagccgaatgtcacctaaaaccttaaactatgtgttcattcatgctgcttgcttacagtgccatccccatttgctaaattgtcacctaacatttggagtttgataaatgtcctcgcagttagtgcttgaaactcatcataattttcatgcttcttaaacttcatttagctgtttttgtttaatagatttatttttatattttatcaccagaccatagtggcagatattttggttttaattacttatgtactaatggctcaatgttgaatgatctgacctttccagttctgtagatactaacaaattaattttatgtttgcatgtgctcgtgtaatatttatagcatttcaaaccgtagtattatggtagaaaatcattatcacagaacattgttgtcagatgtattttgacataaaaatgtaagttgaccagtaattcacattttcagtttttaaaattaaagttatactccaagtaagttatagcacaccaagagtgtcctgttgcataacatgaaggattttgacaacctgcagttcttatggggacgacttccatttgagtactggtcagcagtgagctgtgttgctgaaaacaccagtttaacagggcgctacagatagggatgtaagtgtaagctccagaagaaccacagcaatcagcagtaagtccaccttactttatactgatgagagattgatcattaagatcaagaacagggccaggtgtggtggttcatgcctgtaatcccagcactttgggaggcctaggcgggcagatcacctgaggtcaggagttcgagaccagcctgaccaacatgttgaaaccccgtgtctactgaaaatgcaaaaattagctggacatgatatcatgcgcctgtaatcccagctacttgggtggctgaggcaggaggatcacttgaacccacgaggtagaggttgcagtgagctgagatcgtatcactgcactccagcctgggcgacagagcaagacttcatcttaaaaaagtaaaaaaagagaaaaagaaaatatatttatatgaaaacataagcaagaagtttcaaggaaactagaatgggagcaaatatagcaactgtcagtggccggcatcagaggggaatttgggtcattagcagggtgagagtgttggacagctgaagatgctgtacctacaaattcaaaaccttcccatttaataactcatagttctcttcttgagtagagtaaaaaacaaaacaatgatcaaacatgaaaagcattttaaaagactttattaaatatatcataccagattttaaagaggagtttggtacttttgtaaagtagataaacattttaataggtccctgacttcagaatatactaacggagatgtatcagtgaccaaaatagataaggtctgggcccttggtgacttacattctagtgggcagtagacggacttaatagagttctgaccttcacctgcttccttctgtttctgtggctctctatgcagttatttattcaacagctatttattgagtgccctacaatgtgcctggctatgtgctagacactttgtgatgtccctggaccaaactctgttaccactgtttactacctatggtcagtggatgagatgccttgttagaagaattggggtgggagaattgttaaaggcagactaagaacaatagccgtgatagaagacatcttacttggttttcttttctaaactttcagaatgtatttaggcacctaatttaatgattaaaacttatcgacaaaagataactgtcagattggaaagcattttggatgttaagatatttttggtaaagtttttttttgagagagagtctcactctttcacccaggctggagtacagtgacgtgatcatggctcactgcaggcttgacctcccagggtcaagtgatcctcccacctcagccttccaagtagctgagactacaggtgtgcaccaccatgcccagcttatttatttatttatttagtaaacaagtaagtagagacaaggtctcactgtgttgcccaggccagtctcgaactcctgggctcaagccatcctcccgcctctgcctctcaaaagtgctgggattacaggcatgagctactgcacccagcaactttaaaaaattgaaatataacctgcagtaaagtttataaatattaagtgaataacttgatggatgtttacgaagttaacacatctgtgttaccatatcgtgcccccttttagctaccactacacctagcccaacaaaggtactgactattctgacttctatcaccactgattggtttgccttttttaaaaaaattactggaaccatacagtatatactctttgatgcctgatagcttttttcccacctcaacaaaacatcaatgagagccatccagatgttgctagtagtagcagcttattcttttttattgcagtatgatattccattatatagatatgtcatgattcttgttacattttggtggttattttaatgatttttggtttgggaccattatgaataatactattatgaatattttacatgtttcttgtgcacatacatgtgcatttctggaggtacaagcctagttgtggattttctaggtcatggagctggtttatgctcatctttggtagatactgctaaacagttttccacaggggttgtagaagtattcagttcaacagtgtatgagagttctagctcctctgcatccttgctaacactgggtatcatcagcatcactctttgtctttttggaggactgaggggacatgctagtgggcatgtagggatattttactgttctttgcacttgctagctcccttgtgactaaggatgttgagcgtctttatgtgttcgtgtgtgtgtgtgtgtgtgtgtcagtcgtttagatatcctcttttgggaggtacctgtctgcttctttgttcattttctataaatgttctgttttttgctttgtagttgtttcatgggagagggtaaatctggttcttccactttaccttgactagaagcagaagtatctacactgaattttgaatgttaacctaatctcatgttcctgggggtaaatataacttgttgtgatgtattttccttgttatatattatagcatccagtttattaatattttgtttaggatttttgcatttactttcatgagtaaaattggcttgcatttttcttctctgataatgtcagtctttagtatcaggaatattttgtcagtctttagtatcaggaatattttggcctcatatcatgagttggtactagaagagtttttgtggggctgttgttaattatttctttttttttttttttttctttttgagatggagtttcagtctttcgcccaggctggagtacagtggtgcgatctcggctcaccacaacctctgccttcctgtttcaagcgattctcctgcctcagcctcccaaatagctgggattacaggtgcccaccaccacgtctggctaatttttgtatttttagtagagacggggtttcaccatgttggccaggctggtcttgaactcctgacctcatgatccacccgcctcagcctcccaaagtgctgggattagaggcgtgagccaccgcgcccggctagggctggtgttatttcttaaatgtttgctggagtgatttggttctggagttttcactgtgagaaggttattatagatttcattcacttctttagtagataatggctatcttagtccatttgtgttgctgtaaaggagtatctaaggctggtggtttatttaaaaaaagagatttctttggctatgtggttttgcagactgtacaagaagcatggtactgacatctgcatctggtgagggccttatgatgcttccactaatgacggaaggggaaaggggagccagtgtatattgatacctcattgtgagagagcaaataggggaggcgggggtggcagatgacaggctctttttctaacagtcagctctagtgggaactaatagtgtgagaactcactcacccccaacacccaacccgagagcattaatctgctcttgagggatccgtccccagaatccaaacacctcccattaggccccacctccaacattgggatcaaatttcaacatgagatttttggcaggacaaacatctaaactatccaaactacagcagtgggctattcatattttctgttgttttcttaggttcattttctttaatcgcctttttttaaggaatctgctcattttggcaaatttttacaatttattagcataataacatcgtatcttttttatatatatagggtctatactcgctctatttttccaatctggaaattcgttacctgcccccgttaatcgtgttgtgaggctgttagcaattccattagtctttttttaaaaaaacacaactttgtctttgttgaccttctttattgtatgtttttctccaaattaatttctggtcttagtattttgtccttccttttattttctttgtacttttatggattttctttcctagcttctgaagatggttgctttgatggtttgtagtttagttttgtttttttatgacgtctactatcaaggctatcagctttcctctatgtcctgctatagctacatcccacaaacttattttatttttaaatgcatgaccagaacacaaccacaaactgtaataggtcatgttccctttatcatttagtttaaaatattgtctaatttctgttttaatatggtgtgtgatgaagtatattgcttaatattcaaacatttgtaggtttttgtttttggtttttggtttttggttttttgtgtgtgtgtaagacagggtcttgctctgttacccaggctggattgccgtaaagtggccataactctctgtagcctggaactcctgagctcaagtgattatcccacctcagcttcctaagtagctgaaactataggctaattatcttttttttttctagttgatttctagtttaaccctctatcagagaacattctatgcatgatttatgtcctttaaattttattgactcttgttttgtggcccaacatttaattaatgttgataaatgttccatgaacaattgaagagggtgtatgtatattatatatatatacacacacacacacacacacacgtatatatattacatatatatatttcaggctttactttgaaataaaatcttgtcagaatactgtcattttcatataatttggtagaagttatgtgaaggagaaaatgacaaaattgtagtataaaaaatgataggagtgagaacataagaaaattgggcagatttcatgatacccattatattgagtattatcagtgatcagaaacattttgtgtggctcagattaaagattaaactgaaaaagttgggcaatatttggggaaagattgctactatcacttttaaaagttaaaaagttaatctcttaatacctattcagtttcaactgtctttggcaagaatactttataaagaatgtgctggttaattgatattgtatcccatcaaaaggctcatggtatatggtttttgtaccttcagagatgcctagattgatcaacgagtttaggtggtgagattgcaagattctctgttaacctctcactcattaataatctttccataatcaaggttttttttttttttttttttttttttgagagacagagtctcgctctgtcacccaggctggagtgcagtggtgcgatcttatggcttactgcaacctccgcctcccaggttcaagcgattctcctgccttagcctcccgagtagccaggactatagacgcgcgccaccacatctggctaatttttgtatttatagtagagatggggtttcacatgttggccaggctggtcttgaacttctgaccttgtgatctgcccacctcggcctcccaaagtgctgagactgcaggtgtgagccacccacctggcccagaatcagttatttatttggagactgtaatatggagttttggggattttgggtttttgttttttttttttttttttttttttttgagacagggtcttgctctgtcacccaggctggagtgcagtggcacaatctcagctcactgcaacctccgcctcctgagtagctgggattacaggcgcccacaaccacacccagctaatttttgtatttttagtagagacaggatttcgccatgttggccaggctggtctcgaactcctgacctcaggtgatccgcccacttcagcctcccaaagtggtagaattacaggcgtgagctaccgtgctggccggacttcttgctttttagcagaataaaatgtttgaggcttatgttacacagtacctatcctgacttggaatcatttttttttcctccaagaagtcctggttccttttaatgggaaatgatatttagagaccacagtctagactcagggatactttttgttgttgggctctcactgtccctatgcttttttggtgggtagtgttatgaaagacatatttttgaaaagaaaaagatcatcagtttacattgacatttcagattcagattgcagatagcatacttagtttctttgtttacatttgtatatctgttcccttacactgaaagcctcagttccagcaacagtaattcagctatatgtttgctttatcccaatacagggtattcctatcctaatgtgcattaataataagaggaagtgatttattttaaatagtagtattttcataataccagtattattgttcacactaagactactgaatggcatttacgactttttgctgctctttatttctcattatactacatttctagtaaggatgtacagacaaaatatcatattccaaagtcacttaaaataatcccctgggctgggcgtggtggctgacgcctgtaatcccagcactttgggaggccaagatgggcagattgcttgagctcacaagttcaagaccagcctgcccaacatggcaaaattccttttctataaaaattagctgggcgtggtggtgcttgcctgtagtcctagctactcaggaggctgaggtgggaagatggcttgagcctaggaggtagaagtttcagtcaactgagatcacgccacgccactgcactccagcctgggtgatagagccagacgttgtctaaaaaaaaaaaaaaaaaaagaaaagaaaaaagggctgggcttggtggctcacgcctataatcccagcgctttgggaggcccaggtgggcggatcacagatcaggagttcgagaccagcctggccattatagtgaaaccctgtctctactaaaaatacaaacaaaattagccgggcgtgatgatgggcgcctgtagtctcagctgctcaggaggctgaggcaggagaatcgcttgaacccaggaggcagaggttgcagtgagctgagatcacgccactgcacttcagcctgggcgacagagcgagactccatctaaaataataataataataataatcctttgtgtagttatgcacaacttgatacacagttcatttgtttcagtttaatttttagggattgtatttctataataacttttaattttttgaaaatgtagagcatttacattattataaattgaaaactatgtaacgggagatattcagagaattttgactttcattccttctctctctaggtaaccatgtctttcttttctaagtagccatttttattggtttttggttattcttgaatgttgcttgtttgttttgttttgtttgtgtgtgttttttgagacagagtatcactctgttgcccaggctggagtgcagtggcacggtcttggctcacagcaacctccgcccccctgggttcaagcagttcttctgcctcagcctcccaggtagctgggattacaggcgcctgccgctgtgcccagctaatttttgtatttttagtagagacggggtttcaccatgttggccaggctggtctcgaactcctgagctcatgttccacctgccttggcctcccaaagtactgcgattacaggcgtgaaccaccgcgcccggctcgttttgttttttataaataaaagtaaaatctgtttataaatttgtatttcctcctcttctcacacaaaagtaagcatattataagtattgttctacaccttgcttttaacatttaatcttggagatcattttatgtgtgaacatagtgattatcctcagttcttgctacaatgcatggtatttcattgtgtataccagcttttattcaaccaatgccctattgatgggcattttctttctttttttttttttttttttgaaacaatctcgtgctgtcactcaggctgtagtgcagtggcgcaatctcagctcactgcaacctcagcctcccaagtagctgggattacaggcatgcaccaccacacctggataatttttgcatttttagtagagacagggtttcaccatgttggccaggctgctctcgaatgcctgacctcaggtgacctcaggtgatccgcccacctcagccttccaaagtgttgggattacaggcatgagccactacccctggcccctcccttttttttttttctgacaagttctcactttgttacccaggctagagtgcaatggcgcaatcacggctcactgcagcctctggctcttgggttcaaatgatcttcctgcctcagcccctcaagtacgtaggactagaggcatgcactactatgcctggctaatttttgtatttttcgtagtgatggagtttcaccgtgttgcccaggctggtctcgaacccctgacctcaagtgatctgcctgcctcaacctcccaaattgctgggattacaggtgtgagccactgctcccagccttcataggcattttctttgtttctgggtcttttgccattttaaatactccaatgaatagctagctctatagataagtaatttagtatttttttttttagtgtattttgggctagatttctagacacaggattgctgtgttaagtaaatgcatgtgtaattttcccttcgtgtattgtgagacttggatttttgccagttgataactgagagtagtttcttcatatagttttattttacatttctcatagtttgaattgggcatatttccatatgcctaaaggccattttcttttcttttatgactgttcacatattttcccatattttatcaggttgtcaggtttttttcctgaaacccaaaattatacattaaagatagttactgcaatagactatcaaccaatttttaggtgatttgaagagtatcttgtcagtggcaaaaacaaaggcagagggagacttttaatttctgaactaccatggaaagacaggctttctgttcatggtagtggtaatttttatatgcttttaagaactatactcttagtgatactattaaattgtcctcagaagttagcaatcacagctgggcacagtggctcacgcctgtaatcccagccactttgggaggccaaggtgggtggatcacctgaggtcaggagttcgagcccagcctggccaacatggtgaaaccctatctctaccaaaaatataaaagaattatccaggtatggtggcgtgcacctgactgtagtcccagctactcaggaggctgaggcgggagaatctcttgaacctgggaggtggaggctacagtcagccgagattgtgccactgcactccagcctgcgcaacagagtgagactccatcttaaaaagaagttaacaatcgcatttaggcattacctttcagttaatttgggcatagtattcaggcagaagaccatagagttaaataatcctgcttaattctgtttctaatactatttgagtacttttgaaaagtaagactataagcttcagattttgaatactatctcagcaaactacctctgcaatatctggcgcactgtaagttttgagagatagtcatatcacttggttattctccagctctggggtatccaaaaaattgtctgccttgtactggagactaaggtgatacgagtcagtgagttagagttgggtcctcacccccccaaaaaaagtcagtgagttaatagcctggaagacttaaaaaaataaggtgttgcctaccactttcttttatacattgcattactgatacatgaacagattttcttttaaaaatacagcttcttaatgaaatcctaaaacaattgtcttttctgacaattcgtcatttttcatgtgatttccaatttaaaaatcagatattctatttttctagaagaacctaacaagacatgtgagagcagtaacactagtgctaccactacctccatccagcctaatctggaaaacagtaacagcagcagtgaactaaattcttcccagagtgaatctgctaaggcagctgatgatcctgaaaatggagaaagagaatctcatacacctgtctctattcaggaagagataggtaagaatatacttcatccattcctttaaagggaagttttttcttttttttcttttttttgtgtgtgtgtgtgtggttttttgcttttgtttttgttttttagtttttaattttttaaatgaaagtttggtggggggtggaatttagatgttcttttcctttatttttcattttttttttaaacacagcacttgcactcaatgtttttgttttcaaaatctacaaaagcacacagagcagggaagaaagatccttttcatactcccctccccaaaggtaaccaccatgcatcaacagtttggtgtgtaacattttagatctttctgcagttacatttatgtatgtatgtttacaaaggttttggagagctttgggcgattttttagttttggggttttttgaaatataaacaggatcattctgcatgtattgttctgcatcctgctttttttactcagtgatacatggagagaatctttttgtgttatgaattgaattcatttttttttaaagctgctgcatggtactccagagtatggatgaaccataattcatctactatttctctattaatggacatttatgttgttaacagtttttcattattacaaatagtggtgcttttgaacatccttaacgtatatctttgtgtacttgtgcaggtatttctggcagtatagaaacagtaagtggacttgctggtcaaatggtagctacatttaaaaaacagtgatggctactgcttaattgtatatcaaaagagatttataccagtaactttcatacatttctgtttccttattctctcacttaaattcaacaacatcattcctcttaacatttttgccaatggtgaaaagtatttcgtatacaaatttacatattcttactcatgtggttaagtttcttacatgtatttgttgaacttcctgtgaattgcttattcatatctttttctcactttttcctaatgagttttgttatttttctttaatgaattttaggaatgctttatgtattgttgctattaatcttcaattttacgtatatttgcatagtaattgcctacttttagctcttcgttgtcatacagacatttttacatttttatttacttaaatttatcaatctttttctttagagtttctctggattttgtgttttattgaggagggttatccccatcccaagaatatatatatgttttatagtaattctttataatacttctataactttgttttcaacctatctgaagtaataattttcatttgatatgagttggaaatctgttttaattaggactttttcaattgcaagtgaccaaaccaacttaaactagcttaagtgaagagggaatttaattagctcatgtagttgggaagtccgagccatcatcaggtataactggaccctcaggtatcaaactctttgttttcctctctctctcaccttttaggtctacatatatttatgtgtgttaacctcattctctcccagtacagacaggctattcccatgtggcagggaagatggcaccagcaatttgtatttatatgtttccaaggtctgtgacccaaaggcaaggcccctacttctgctccaaatcagaagcccttgaggaaggaatttgagtggcttatcttggatcatattgtttctaaccctatggccagggcaggcaaggtactacgattgatgcctccagcaaaagttgggtaggaatggttttctaaggaaacagggacgctgcaaatattatagcatagtaaatatctacacttccatcctttggtagctcagcacgtgtgtgtactcacatttgttctcatacatacaattcaaaaatggttctgcctaatataatgcaaagatttcacccacaacttaaaactttttcaaaaacctctttcccacagttacatcctgtaattgtatctagacctaaatctagtatttctctgtgtgtatattaatttcagtagatctgggccgggctcggtggctcacacctgtaatcccagcactttgggaggccaaggcgggcggatcacgaggtcaggagttcgagaccagtctggccaacatagtgaaaccctgtctctactaaaaatacaaaaaatactagccgggcatggtggtgtgtgcctgtaatcccagctactggggaggctgaggcaggagaattgcttgaacccaggaggcagaggttgcagtgagccgagatcgtgccactgcactccagtctgggtgacagaacgagactccgtctcaaaaaaaaaaaaaaaaaaaaaaaattaaattccagtagatctcgaggtggcttatcttgatctcacaatccatgagccacattatgaatttaactgcctatgacactcataaacatagtagagggtgttctttaataaaactggatgccattgtttttctgggagaatggctgtgtttgagaggtgagaaacatataagaagattccccttctggaggccattctgttttacctgcctagttcctgctgtctgttactggggttgggttgctggggacttctataggattaaacaatcatataaccctatttggcaggtttggggttttttctgacagtagcactcacttgtagattcctaggttcccagctagtacttaatgcccagtaacttgctttaggatccatgaaggtgaacaccctccacttcctcagtttatctgtttagtaggccaatagtcctagtcctcaggtgaagagtttgtgtaggcttctgcctgctggtatcattaaacagtgagctgcagaggctgatgtagatctgtagcctgctgccaggctgcatcacaaggatccactgctttataataggaggaatatggcctttgggcagagggtgttcagtaaagacctctaccctcagtttagttctttttctccattcctttaagtcttacccctgtggtaattttctcctcctttcccttatttgcactaaatttagcaagtgataaaggattgactctgagcagtattggattgttggctctgaattaggaagctttttaaaagcactgtgtcattctctttctcttttcgggaaatctgacccagaccaaatgatgtctaaaaagtatctattacaggactttatagatggtcccaagaactaaccaccatagttcaacatcttggcataaaactccatgatctgaaggccaggcgcagtggctcacgcctgtaatcccagcactttgggaggctgagacgggtggatcactggaggtcaggggttcaagaccagcctgaccaacatggtgaaaccccgtctctactaaaaatacaaaaattagctgggcatggtggcgggcgcctgtaatcccagctacttgggaggctgaggcaggagaatcgcttgaacccaggaggcagaggttgcagtgagccgagatcgcaccactgcactccagcctgggcgacaagagcgaaactccatctcaaaaaaaagaaaaaaaacctccatgatctgagacccaagagaaaattgatagtctgaccaactgctttgctaccacacatccaaagtgacttgctttccagcctggggtggcaagatgctcagtaccctctctccattttgacttattatttaaggagggcaaagaggtgtgttctttctgtttaaaacaaaaatctgtggaatgtgagataattttaattaccataccttaaaaatcggggctggaaatttgtagaaatttctagacctacttttgaattgtattttctttatttccaaaactgtagtagtgtgatattttggagtcaaaatcttaaaatattctaccagattatttagaatttactggttttgatagaaatacatcaaacttgcttaaaaagggaattttattgacatacactattgagaagtccagtgttggtgacagcctcaggtgcattgttggatctagggagccaaatgaggttatcgaggctacttctgattttgccgtttcatatttttctgtttatttcttctttgtgatgggcttattgtttgctgttatcaacggttttctccatgttgtgggaataaaagtggccaacttctgatttacacccttcctgctcattagtacaaaaagcaaagaccccttctccatctctggattttaaaaactggaaaaggatgctgagaggattgagccaaagagccagtcctgggacagtcactgtggccagctagtggtgtgctttgtctggccacgctgggtcctgctgctcgctccaaaggggcaacatacttgatttgcagccctggcagaatcatatgattaaagtgtgggagggcggtggtgagggaagtatctccccaaaggaaagaaggggtatggaacaggtaaaattaacagatgtttacaaaattgtcttaattattttccccaaaatgcatagccagttttcccaatcctagtttttctctatttacttaaaatgccatctttattatatatcatatagtaaattatctgtcttttcatttgccagtgccacagtgtcttcatttttttaaagctttaaattaaaaaggaaaaatcagagcttattcaactatctggtcaatggaaatttaacagtgatgcagtagttttagaatgtatacaaatttttccagcctgggcaatatggcgaaaccccatctctgcagaaaatacaaaaaattagtcaggtgtgctggtgcatgcctgtggttccagctacttggaaggctgagatgggagaatcacctgagcctgggggttgaggctgaggtgaactgagattgtgccactgcactccagcctgagcaacagaatgagaccctgtctcaaaaaaaagaaaaaaaaaattcagccaaagtgagattgatcagtatgtaaagcagaaatttgctcctgtggagtttagtgtgtccttaaaaatttactaggaaaatgttgagaggtctttattaggttataaaaaactaatttagttgattgttttatattgataagcctacacagataattatctaaattccctagtggaaaattcatgacatttatgtttataagctcaaaactatttggtatttaaacagaatttcagtggaaatctttcaaaaacttaaacctttttatacagaaatccatattgaatatataaggcaacactttgttagtttgctttttgagttattattatgtttgttacttgtaagtttgtagcagctcttcctgttttcaaacagatgagtttttaaacagataacccagcatgtttcaattttttgtggaataatagatgactcacagtaaagttacaacatattttcttttaagtaaaaaacttaaggaataatgatacttgctttgccattcaagggcctttttttatctgtttactttgtggatcttacacatacaccagatacgagttttggtgaaataaggtggttataattatttacttattgtcagcaattgctttgtggcctattcatttgacagtaggtgatttcaaatcggagaagtccaacggggagctaagtgaatctcctggagctggaaaaggagcatctggctcaactcgaatcatcaccagattgcggaatccagatagcaaacttagtcagctgaagagccagcaggtggcagccgctgcacatgaagcaaataaattatttaaggagggcaaagaggtgtgttctttctgtttaaaacaaaaatctgtggaatgtgagataattttaattaccacaccttaaaaataggggctggaaatttgtagaaatttgtagacctatttttgaattatattttctctgtttccgaaactgtagtagttaacaagactgaaagtattaggctttataagcatagttgcgtacccaaatttcagtcaaggcataaaaatgctataaatggctgatacactttcttactacatgaacagttttattctacatataattctaaagaattaaagccttctttacacatatgagtaggctattttgggttttatggtttattaaagaactgtagatgattcactgctcagttctagctatgatcacttcaggtgaacctgcagctaattagaggatgaggcttacccactgatagcagagtactgtggataggacagcatggcatcccagctctgatcatgaacaatgggatcagagctaggactcggtatctctgtgcttcagctagccgtggtgacaggacatggtcccaactttgtctcccatattcgagaattatttgcagggtagatatgcaagaataaaggacattcttaacattgcagcaattgcttaaaagcaatggctttcatacttctttttgactctgaccctcagtcacatacacattttttcatagcagcccagtacacatattcaaaagctttctgaaatactattttactttatgatgtgggaagcactctgatattttctgtgctagcctattgcattacattttattttttaaaaaagctgaataaggccactgtttatctgatagtccactaagagttgggatcaactgtttgaaaatactattttgaagtatccatggggtcttacactgtagctggaatgataaaaggacccgaaaggatgtttttaggaatatattttttgggggatagtacatgcgatgcccttctttttcccttaagtatatgttataaacttgaaaaaaatgataggtgagtaatttatatgtatggtttcatgggtatatttgaagtattaatacatgaaagcagtgaataatagtatctgacatgtaataggtacttaatatgtgttagttttctttctgcaggcatatcttggttgtttaattgtaaacaattagctttacttttaacttagcttttagacttcaaaagttctatcataagatttatcttaacttactttgaatgattaattttaattattgaaagacagttgattagatgaaattcacatctttgattgacataaataatgcagtctttttatttttttggtcaggtactggtagttaactctcaaggagaaatttcacggttgagcaccaaaaaggaagtgatcatgaaaggaaatatcaacaattattttaaattgggtcaagaagggaagtatcgcgtctaccacaatcaatactccaccaattcatttgctttgaataagcaccagcacagagaagaccatgataagagaaggcatcttgcacataagttctgtctgactccagcaggagagttcaaatggaacggttctgtccatgggtccaaagttcttaccatatctactctgagactgactatcacccaattagaaaacaacatcccttcatcctttcttcatcccaactgggcatcacataggtaaaggaaactaaggttaatttattgctgtaaatatactaaatgtttataaaatgattgttgtagttgtgcatttgaaaacgtcattaccaatgagttgaatgaagtcaatgtggtcagcagacaggacattagaggcatgagtgtacttctaacttactgaaccgacaccactaactatttggaggatttttaggagtcatcgtctttatacctggaatcagatggaggccaaagttacaactattgtgcttttaatttaaggtcaacctagtgaaataatttctctcatttcttctgaaatacagggcaaattggatcaaggcagttcagatgtgtagcaaacccagagaatttgcattggctttagccattttggagtgtgcagttaaaccagttgtgatgctaccaatatggcgagaatctttaggacataccaggtaaatgaattctgagccttgtaaatgatgagtattggactcccttttgaaatactagcctattaataatgaaagttaatatatttaagaggccatattgaagactttacttttggcctcattttcttcctatataagttgtaaacatgaatgaatattattagttctttcttttttttttgagacagagtcttgcactgttgcccaggctagcatgcagtggtgtagtctcggcttgctgtaacctctgcctcccatattcaagcgattctcttgtttcagcctcccaagtagctaggattacaggcacccgccactgtgcccagctaattatttgtatttttagtagagacatggtttcactgtgttggctaggctggtcttgaactcctgaccttgtgatctgccctcctcggcctcccaaagtgccgggattacaggtgtgagccaccgcacccaccatgaatattagttcttatttgccatacaggattgtgatgaagatcaaaagagatctggtatatgaaaatttaaaatattttctaaagtaaatagcatttttattgactagaaagagcactcacattttttagtattctggaatcttgtaggcactatgctaggaatctgatttacatctgtttttaaagttcattgtccaaccaaagatcatatagctcctgagtagacccagggctgtgcaacttcaacagatgattaaaaagaaagaaaattttgtgacttgaatctactttttagccctgatagacttgctttgtaactttagtctttaaaaagttattattacaaaactaaggttatggtaaataatagaatatttaagggcataaagcaaaaagtaagaaccattttatcttctctgccccaatcttttctacagagtccactccaaaggcatagccctatagtttttaaaatataaatacaagccaggcacatgggctcaacttctgtaatcccagcacctagggagaccgaggtactaaaaacacaaaaattagctgggtgtggtggcacatgcctgtagtcccaggtactcgggaggctgaggcaggagaatcactttaactcaggaggcggaggttacagtgaaccgagattgcaccactgcactccagcctgggtgacagagcaagacttcatctcaaaaaaaaaaaaaaaaaaaaaaaaggaatgtaatatatgtttttgagaaaagtacatttatgcctactaaatggttttcatttgctaaaggtatggctcccagttttctttggtgtttccaccacatacatttttttttttttttttttgacacaggatctcactgtcacccaggctggagtacagtggcgccatcacagctcactgcagccttgacctccctgggctaaggttatcctctcacctcagcctcctgagtagttgggactacagacgcattccactatgcctggctaatttttgtattttttatagacacggggtctcattatgttgcccaggctgttcttgaactctgggctcaagcaatctgcctgcctcagcctaccggagtgctgggattacagttgtgatacatttctgataagagtgcaattagtacagtggttgctataaccattttagagaatggtttgacaaaaacaaagttaaaaatgcaattcgactccttcctagtacagtagagagacttttaccctgtgtacatgagaagacattatagcagggtgttccttataatattatttcataatggtgaaatttggaaacaattcctaagtactcaatcaggctttttttttttttttttgagacggagtctcgctctgtcacccaggctggagtgcagtggcgtgatctcggctcactgcagctccgcctcccgggttcacgccattctcctgcctcagcctcccgagtaactgggactataggcacccaccactatgcccagctaattttttgtatttttagtagagatggggtttcaccgtgttagccaggatggtctccatctcctgaccttgtgatccgcccgccttggcctcccaaagtgctgggattacaggcatgagtgactgcacccagccaatattgggcatgtttaaattgtgttatttcatgatggactgttacatagcagtgaaaaacacactggagcaacaagtgtcgagattgaatctcgtaagtttacaatagaaggaaaacatttggagagggtgggaggggcacaagggttgtaaaaattacctgttgggtacagtgtttactctacgggtaatgagtaactagaaactgtccccccagtgcacatagaccccttgaatctaaaataaaaatttttaaaaagaaaaaacagttccatcactaaaaatacatcaggataaatctatatactacatacatttatggagattttaaaagcatgtgtgataacacaatgttacagtattgtttagggatatagacgtttgtaaaattttaaaggcaagggctatatgcttgaaaggtaagaaatacacttctaaataaataaatactcaactataaatcataaaactagaagacattttgatctggatgttcatgaaagtactacatacattgaaatttgtcacatgcaattaaagacttcctaggagaagttgctagcttttagtgcttatattagaaaagaaaaactgcaaattaattagctagggatacatctcaaggaaccaacctaaagaaataaaatattaaagatgagcaaatatgatgaaatagaaaacaaatataccttagatcccattatgttttataagtctctgataagattatcaagggggaggaaataatacagcacaaataaccaatatcaagaataaaaaaagaggccgggcatggtggctcatgcctgtaatcccagcactttgggaggccaaggtgggcagtcacctgaggtcgggaattcgagaccagcctgacgaacatggagaaaccctttctctacttaaaaaaaacaaaaacaaaaaacgaaattaaccaggcgtggtggcacatgcctgtaatcccagctactcgggaggctgaggcatgagaatcgcttgaacccgggaggcggaggttgcggtgagccgagatcatgccattgcactccagcctaggcaacaagagtgaaactctgtctcaaaaaaaaaaaaaaaaaaaaaaaaaaaaaagtaaagaaagagacatactaaccaatatttctgattctcttttattagaacttggaattttaaagccttcacagggtcactaacacagtattcaggtttcctacatccacaaagaaaggggtccacctagaaagagtggaccaagatggtggaataaaagtccccaactcatcgtgccccaccttccatccccactgccacagaaagggacccaccgagctccttttgggtggggggaagggttggggaggatgccacaatgatctcagtccttagtagggcagaagccacactcttaggcaggaaaaggatttctggttatcactgcacctgtcattaaggtgatcgcaggaccagatgatttcataaggtatttcttaaatttcgagaaccagatagttctatttaaacttttctaccagaatagaaaaaggaaattttataattattgtttctgttagtgtgaaactgttaggaaacttgataaatagaaatagacaaatagaaaattatggccctgtcttctttattaatatttattaataattaatagcaaataggtgtatctataagaaatctgaaaatattggtatgcagatatattcaggagtaaatttaaagaataagaaaccatggctgaattggcttcaccttagacaccaatctccaatactaggagattactaataccatactattttaagaagtcaaagaaaggctggatgcagtggctgacacttgtaatcccagcactttggaaggccaaggcgagtggatcacttgagcccaggagtttaagaccagcatggccaatgtggtgaaaccccatctctactaaaaattagccaggcatggtgttgcatgcctttagtcccagctactaggaggctgaggcaggagaaccacttgaacctgggaggcagaggttgcaatgagctgagatcgcaccagtgcactccatcctgagcaacagagcaagatgctgtcttaaaaagaaaaaagttgaagaaaggaaaccttttgatcatctcattagatgccaagaaggtattttatctaagttcattataatttattgggtttttttatttttaatttttttacatttttaattttttcgtagagatggggtctccctatgttactcagactgatcttgaatctctgacctcaagttatcctcccaccttgacctcccaaagtgctgggattacaggtgtgagccgctgcacttggcctatttattcattctttttttaaactcttagataaatacgagtatatgaagtctttttttttttttttgaagatgtattgcaaaccaaattattatgccttttggtgaaacccttgaagcattcccaataacattcaggtggaacaaaaaagatacccactattggccaggtgaggtggctctcccacctgtaatcccagcactttgggcaaccacgtcaggagaatcacttgaggccaggagctggaggctgcagtgagccataattgcaccactgcactccagcatgggcaacagagtgataccctgtctcaaaaaaaaaaaaaaaaaaaaatttctaaaagtaccaggaaatgcagtttgccaagagaaataaaacttataaatattgtcaagatatagacacaattattatatgcagttgatctaattaattaacacatacaattttgttccacgctgaactccaccaaaactgtggccaaacttttgtaaaattacagacccacagggacaagaggaacaacagaaaatacaccacctataaaattgctgaagcaataatgcaggtagacaaatggcagcctacccacaaaggccaaatcccaagtcagtgggggaaaacagtcctcaaaagatccaaaagcaggaagtacagagccagccgctttggatgcttggctgtagtagacctgttttatgctgcagtcacgccagataccttgattgtggtgagccctgtatcttccagggtttgctcatgatctcacccactgatttcaccaaaagaggtctgtaaactttcctgaaagctgaagccagactgtgacccagagacaagtttatattttcctgggaaccttctttgatagtaacaatactgctctatgcaggtagttttatacttgatgctgagttttttttcttttttttttttttttgagacagaatcttgtttgtcgctcaggctggagtgcagtggtgcaatctcagctcactgcaacctccacctcccgggttcgagtgattctcctgcctcagcctcctgaatagctggtattataggcgtgtgccaccacgaccagctaatttttgtatttttagtagagatggggtttcactgtgttggccaggctggtctccgactcccaacctcatgatctgcccacctcggcttcccaaagtgctgggattacaagcatgagccaccgcgcccggcctatgctgagttttcaaaaggcaaacttatacagtttgggatgcacacacataggttctaaaagtataaggaaaaacaagggaatgtttagcacaaaagtattgattgccagggagttggacacacaagcatctgatgtattggttgtagataaagttctgtttcttaacctggttgcattttacatatttttgaaaattttaatgaagcagaagattccaggaacaacaacaacaaaaacctccagcacctaggaataattgtgtgtgtgcgcatgtgtgtgtctgtgtgttttgagacagagtcttgctgtgtcgcccaggctagagggcagtggcgccatctcggctcactgcaacctccacctcctggtttcaagcaattctcctgcctcagcctgctgagtagctgggattacagacaagtaccacaatgcccggctaattttcgtatttttagtagagatggggttttgtcgtgttggccaggctggtctcgaactcctgtgctcaagtgatccaccctcaatggcttcccaaagtgctgggattacaggcgttagccaccgcgttcagccaaatgtaacaagaaatattcaaggcctgtgtaaagcaatctttaggccaggtgtggtggcacatgcctgtaatcccagcactttgggaggtgaagcgggaggattgcttgagcccaggagttcaagaccagcctgggcaacatagggagaccctgtctctaccaaaaataataattaattaattaattaaaaagctaagcaatctttaaagcttaactaaagacatgaaggatactttgggaataagattttccatcctggagcaggggaggtttgaccaaaacgatactaatatttgatctagaaaagttaatgtgcaagaatactgcacacagtagctcacgcctgtaatcccaacactttgagaggttgaggagggaggatcacctgaagtgagaagtttgagaccatcctgggcaacatagcaagactctgtctctacaaaaaaattaaaattggccaggcatggtcttgcttgcctgtaatgccagctgcttgggagactgagcctagaagttggaggaggattgcttgagcccaggagtttgaggctgcagtgagctatgattgcgccactgtactgcatcctgggcaacagagtgacaacctgtctttaaaaaaaaagaaaagaaaaaaaagttattgtgtaagaatagccaaaaggggaaaaaatagatgttagtgaaaaaggtactagatattaaagcacattttgaagcttcaataatttgttctacagaagaagcaaatcagtagataaaatacagaatccaaaaatagacctaagcatgggaatttagctgtagtagcattgcacatcacaaagggaaagcatgtttgggaagatatcacttagatctctgccttagcaaaaaacatttagattgatgaagaattgttaaaaaaaaaaaaacccagaaccctaaaaacaaaagaaaacgtcaataagaaagcatgaattaatttatgtttttgttgtgatactttctttttaaacagataaaaaatccagatgccatagaggaaaaaagtggatacatatatttaaaattctgagtggaaaaatgttattgtaatcaaagtcaaaagacagatgacaaaccgaggaaaaatatttttaccacaaatggaaaattttcttgattgacaaagaccttttataaatgaaaactactaatagtctaatacaaacaagacaaaggatttgaataggcattttgcagaaaaataaatatgaaaggccagtagacataaaaaatgattacttctctcataattaaaaacaatgggatagtattttttacctctgagtttgactaacagtttagaagttcaatactaactcagcatgagtgaaggtgtaggaacgcagggtggctttatgattgcactgttctgaagagtagtttgaccctatatccgtcagcattttcagtgcaagaacttttggacccagccatcccaccactggaggatataggggggtactccccaggtttaccaagaaagacataaaatattgtttgttacagctatggctgtgatagcaaaacaccacaaaaccctgagcaccagtggagttgaagttgagttcattctcttggttggacttcgttggccaagaagtagaaagaaaatctgccactggcacacccaccagcatgctactctgggataggtagcatcagagattagccataagactgcctaactggccttgcttcctccacaaagagaagcctttgtatttggtgataaaagggacctctttgcctcatggacaccaagaacacaactgagcaccctgcccagctttgagctcctagggtgtcactgcgctgaagtccttcagacagtgctccattcctggcctctctcagtgaaaatggcccagttgccatgctggacctggcctttcagaggtgtatagaagccaagccctcaaaatctccatgagaaatcctacacagtcctcctggcatagtcaccccgccttactcctgtagcctgagactgtcaggttatccaccgtattgtgcctacagagctagtccttctccttagttccaagcgtgttggcagagggatggaatttgagtacattagctcccagtgaggatctgctccctttcccctcctcccatcagcttatgagagactacgaagagcctatggagaatgtttgctacaccagttgagtgcagttaataggcatgagctgtcagcctgggggagactgtattctgggaacctacaatcacagggacacaaagccgtcgtaaaagttgggagggagagaagaagccgggagattgatggggagttttttgtggggggaaaggagataaaaagactgaaatcccctcccacatcttttcggcatcactaccccaagttaacaaaaggtctctattctttctgcagagctgtgcatgagaaattggctgcatctggttagggtgtgataaaagcagttcttctgccactagcgctcttagagacaagagctcctttctttgtaggttttgcttcgtgtctctctgagaaatattctgattcataaaaatctagtctaatcccctaaatgtagagcctcaccacagtctttactggtaggtgcagtgatttcctttcctgcctgagaaggagttgtggccgatgcctgtgtctcatgatttaggtcaatatgggccgaccttcctcatccttcctctctttctcgaaagatggggccccatgggcccctttctctgcggatgtaagaaacctgatttctgttagtagatctgtgagtgctttaaaatccgcagtgcttgtgagaatcagaaatactggttgataaaataaatgtttttgtattctttggtcttcgttttttggaaggaaaaaactctggaaacaaagtattctttaacagtgacctggtttaataaattatggcatatccatgcaatggaatattttttaattccttaaaaaaatctgtatattttgataaggaaagatcttctagtgtaattatccattgattaaaaactgtggttgtgtgtgcactaaaaagtacatatgtgtgaatatgtaatggactatgtaaagagatacataaatgttggtatataccatatatacatgaaatgttttagaaataaatcataattatttcttatggaaaggatatagtatttcttgtttttgcctttttgtactctttatcttttcttgttaaggaattgtacaactacaactaagttttgtcagttggggttgtctggtttgtaggattataacagtctgctttgttttcctaatttttcagtattgcatttttatcttttctgtttatttttccaagttaacattgtctttctatgcatgaattcttaggttacaccggatgacatcaattgaaagagaagaaaaggagaaagtcaaaaaaaaagagaagaaacaggaagaagaagaaacgatgcagcaagcgacatgggtaaaatacacatttccagttaagcatcaggtaatttttacaacaaccctttaaaatagtgttagccatttctgagacttttattctgaaactttgaatacttactaattttatttttgacatagtctttgtattttatttatttatttatttattttgagacagagtctcgctctgttgcccagattggagtgcagtggcacaatcttggctcactacagcctccgcctcctgggttcaaacgattctcctgcctcagcctcccaagtagctgggattataggcgtgcaccaccacgcctggctaatttttgtatttttagtagagatggggtttcaccatgttagccaggtgagtcttggaactcctgacctcaggtgatcctcctgacttggcctcccaaagtgctggaattacaggcatgagccactgctcctggcctacttttgacatagtcttttaattaatatgttagggataaagtacatcttcctggcaaatttacaaagcattggtttatcttagaatattggaggcttacaaggccaatttgttgaaattgttataaaactgtaaaattgtgttacattttacatgctaaaaaggagtattagttcattaatctttgattcccagtgaaaactaaattgattagtaaattttttttgtccccacttggaaaaacctggggatgattagtaaatttcatttgcctgactttgaaacttgtttggtaaaaatgcataaaaccacatgtggtttataagcattgttattcttattgtttaatcaaaatgttttcatttacaccaggtttggaaacaaaaaggtgaagagtacagagtgacaggatatggtggttggagctggattagtaaaactcatgtttataggtttgttcctaaattgccaggcaatactaatgtgaattacagaaagtcgttagaaggaagtaagtaattaaaattacatgtcctgcataatcgtttctgctttatatttcttataaatttgtagtattttgactatattttagataaaaacatttttctgaaatttttattcgtactgcagaattactagtttagtttactaaaaccctaaaactttaaaaattacctttattcacaggaatttgatgtctcagatttccgtaagattgtagaatggaacttgttttttagaagacgcctcagccgcctgattatcatttttcaaaatcttaaatttaggccaggcagccaggcgcggtggttcacgcctgtaatcccagcactgtgggaggctgaggcaggtggattacttgaggtcaggagttctagactacctggctaacatggtgaaaccctgtctctactaaaaatacaaaatttgctgggtgtgctggtacacgcctgtgatcccagctactgaggaggctgaggcaggagaatggcttaaacccaggaggcagaggttgcagtgaaccaagattgcaccactgcactccagcctaggtgacagagcaagactctgtctcaaaaaaaaaaaaattcaggccagccacagtggcttacacctataatcccagtgctttgggaggctgaggcaggaggatcacttgaggccaggagttcaaggccagcctgggcaacatagcaagaccccatctctacaaaaacgttttaaaaattagccaggtgtagtgccacatggctgtggtcccagctacttgggggtctgaggcaggaggattgcttgaggccaggagtttgaggctgcagtaagctataattgtgctgttgcactcgagcctggatgacagaaccagactcaatctcttaaaaaaaaaaatcttaattcagtactaattcactgaggagtcatgtatctagtaaccttagcattgttgcaagtaagagaaaaccagaaagaaagtgatagaggcttccaaaacactgtcacataaatgaggtttttcagtgagaacatttggacacaggatggggaacatcacacaccggggcctgtcgtggggttgggggaggttgggggatagcattaggagatatacctaatgtaaatgtagagttaatgggtgcagcacaccaacatggcacatgtatacatatgtcacaaacctgcacgttgtgcgcacgtaccctagaactaaagtataatttaaaaaaataatgaggttttttttggggggaggggttgtttttgtttttttgaaatggagtcttgctctgtcaccaggctggagtgcagtggcgtatctggcctcactgcaacctccgcctcctgggttcaagcagttctcctgcctcagcctcccgagtagctgggactaaaagtgcacaccaccatgcccagctaatttttgtattttttatagagacagggtttcactatgttggccagggtggtctcaatctcttgactttgtgatctgcccgcctcggcctcccaaagtgctgggattacaggtgtgaccactgcgcctggcctataaataagctattaattgagtttttacaactggctaatgagctttagtatttagaatcaccgaactctatagagatgaactgctcttttaaaagatcatgtgtttttaaactcaagttcaatgagccgattatttcacgagggtgccaggtgacatagtgaagaccacatatgcacagagtgatagaacgctggcaggtcccaagcccttttctgtgattcttctcttacctcaccactatcctgctcttgacaggattacggtttctttgcactctcttctctttcttcagccagacctttctggaagaaatcattcatttaaattaaaaatagatatattttttatatctattttctcacaccagtatcttgctcgcgacagaattatgatttctttgcactctcttcccttcagccagacctttctggaagaaatcattcatttaaataaaaaatggatataccttgctaggtccttgggatatttaggttcaagtgaagaaggtaaagaataggaaaatgcctttaagtccaggtgccatggctcacacctgtgatgggatgccaaggcaggggaggatcagttgagcccaggagttcaagaaacagcctgggcaacatggcaaatccccatctctacaaaaaatgcaaaaattagccagacatattggtacacacctgtattcccagttactcaggaggctgatgagggaggatcgtttgagcccaggagttcaaggctgcagtgagctgagatgaacccactgtgctccagcctgggtgacagagcaagacactgtctccaaaaaaaaaaaaaaaacctttaagtcccaagaatattcatctagacagtagttctgttttgggaggcttgattttttttttttttttgtaattattatgggaaatttaaaactacacaaatacaaagagaataatgaactcattcagcttcaacaattatcaaagtttatcactttttttttttttttgagatggagttttgctctgtcacccaggctagagtgcagtggcatggtctcagctcactgcaacctccacctcccgggttcaatcaattctcttgcctcagcctcccaaatagctgggattacaagtacccgccaccacgccgagctaatttttgtatttttaatagagacggggttttgccatgttggccaggctgatctcgaactcctgacttcaagtgatctgcctgcctcggcctcccaaagtgctgggattacaggtgtgagtcactgctcccagccaaattttatcactctttgtttagttgtcactgaccactttttttaatcctgcagtgttttaaaataaatcccagaaatcatgtttcaccagaagttcaatatgtatctctacgtagacatttttccataaccatcatgtcattatcacactcaacaaattaaccgtaattaacaaattaataatctgattctcagtccatattccacttgccctggttgtcttagagatacctttttactgtaagcagtaaacaaggccacagattgcctttgatcctttttttcagtcttttattctgttatataaacttcaaggagtccaagaaccattgaaatagattacaaaagtttatatacatacttttttccttggtagaggatcatagcatttatccatttctaatagggttctgtgacacaaagtatgttagaaaccactgatatgggctttctggaatgatcaaatagattgtgataatccttcatacacgagttttctttcattttatttttttatgtgtgtgacagagtcttgctctgtcagccaggctggagtgcagtggcaccatctcagctcgctgcaaactctgcctcccaggttgaagcaattctcctgcttcagtctcccaagtagctgggactacaggctcgtaccaccatgactggctaatttttgtatttttagtagagatggggtttcaccttgttgggctggtgttgaactcctggcctcaagtgatctgcctgcctcagcctcccaaagtgctgggattacaggcatgagccaccacactcacccaaattttatcacatttgtttcagttgtcactgaccactttttttttttttttttttgagatggagtctcactctgtcacccaggctggagtgcagtggtacgatctcagttcactgcagcctccaactcccaggttccagcgattctcctgcctcagcctcctgagtagggatcacagttgcacgccaccatgcctggctaatttttgtatttttaatagaggcggggtttcaccatgttggctaggctggtcttgaactccttgtcctcaagtgatccgcccaccttggcatcccaaagtgctgggattacaggcataagccactacacccatccaaattttatcactcttgtttcagttgtcactgacaatttttttttttttttttttttttgttgacacggagtctcactctgtcgcccaggctggagtgcagtggcgtgacctcagctcactgcgacctccgcctcctgggttcaagcaattctcctgcctcagcctcctgagtagctgagatcacaggtgtgcaccaccacacccagataatttttgtatttttagtagagatcgggtttcaccatgttagccaggctggtctcaaactcctgacctcaggtgatgcacccacctcggcccctcaaagtgctgggattacaggcatgagccaccgcaccagcctatagtattaatgtttatcttgtagctgactatgttactgaatcacagttttttgttttttttttaatttttggacacagagcctcactctgtcacccaggctggagtgcagtggcatgagccaccgcaccaggtccccccccccctttttttttttatcctgcagtgttttaaaacaaatttcctaaatcatatttcaccaaaaatgttcacaaagttttctgaaatgtctgaagttcaggcattccttctgtgttttaggtcagccaggcatataggattatatggtaccttatactcaataagacctttgtcttttttttttttttaaatgaaaaaatgaaacataacttgctggaaattacttgtttattttcactaaacttgacatattaaagtgctaatactctggaaataacgtaaattatcgttacatggttctttttagccaaaaataatatggatgaaaatatggatgagtcagataaaagaaaatgttcacgaagtccaaaaaaaataaaaatagagcctgattctgaaaaagatgaggtaaaaggttcagatgctgcaaaaggagcagaccaaaatgaaatggatatctcaaagattactgagaagaaggaccaaggtaaggagagtcagctgtggagggcagcctgggggtgataagaatgcactggatcagggtcccaccacaggaaaggtactgcgttgtgttttcttgataacagctttatcaaaacataattgatatcccatacaattcacccaattaaagtgtaaattcagtggcttttagtatattcacaaagttcaaccattattacatcaatcttagaacattttcataaccttgaaaagaagcctcattcatacccattagcagttacttcccaacccctcccgaaagtgccaccagcttagtggtctactttctgtctctctggatttgcctattttggacagtccatagaaatggaatcagacaatatgtggtcctttgtggctggcttcatccacttagcatggttttaaggttcatccatgttgtagcatttatcagtactttctttttgtttctgaataatactctgtatggatatgccacattttgttatccattcatcagttgatggacattgggctgtttcctcttttggctatacgaataatgctgctatgaacattcatgcagaagttttttgtggccatgcgttttcacttctcttggcgatatacctaggaatggaattactggatcatatggtaactctgtttaaccttttgaggaactacattgtcttttgtaacaagtcatttttaaaaaaaaactagataagctagataatgcatgtggctagagatactttaaaaaaatatttttggctgggcgtggtggctcatgcctgtaatctcagcactttgggaggctgaggtgggcggatcacctgaagtcaggagttcaagaccagcctggccaacattgcgaaaccctgtctctactgaaaattcaaaaataagccaggcatggtggcacatgcctataatcccagctacttgggaggctgaagcatgagaattgcttgaacccaggaggcggaggttgcagtgaactgagatcatgccactgcactccagcctgggcaacagagtgagactccatctcaaaaaaaaaaatatatatatataaattcctcctttcagagtaaaaattacatttatataaatgtctttgtttcacagatgtgaaggagctcttagattctgacagtgataaaccctgcaaggaagaaccaatggaagtagacgatgacatgaaaacagagtcacatgtaaattgtcaggagagttctcaagtagatgtggtcaatgttagtgagggttttcatctaaggactagttacaaaaagaaaacaaaatcatccaaactagatggacttcttgaaaggagaattaaacagtttacactggaagaaaaacagcgactcgaaaaaatcaagttggagggtggaattaagggtataggaaagacttctacaaattcttcaaaaaatctctctgaatcaccagtaataacgaaagcaaaagaagggtgtcagagtgactcgatgagacaagaacagagcccaaatgcaaataatgatcaacctgaggacttgattcagggatgttcagaaagtgattcctcagttcttagaatgagtgatcctagtcataccacaaacaaactttatccaaaagatcgagtgttagatgatgtctccattcggagcccagaaacaaaatgtccgaaacaaaattccattgaaaatgacatagaagaaaaagtctctgaccttgccagtagaggccaggaacccagtaagagtaaaacaaaaggaaatgattttttcatcgatgactctaaactagccagtgcagatgatattggtactttgatctgtaagaacaaaaaaccgctcatacaggaggaaagtgacaccattgtttcttcttccaagagtgctttacattcatcagtgcctaaaagtaccaatgacagagatgccacacctctgtcaagagcaatggactttgaaggaaaactgggatgtgactctgaatctaatagcactttggaaaatagttctgataccgtgtctattcaggatagcagtgaagaagatatgattgttcagaatagcaatgaaagcatttctgaacagttcagaactcgagaacaagatgttgaagtcttggagccgttaaagtgtgagttggtttctggtgagtccactggaaactgtgaggacaggctgccggtcaaggggactgaagcaaatggtaaaaaaccaagtcagcagaagaaattagaggagagaccagttaataaatgtagtgatcaaataaagctaaaaaataccactgacaaaaagaataatgaaaatcgagagtctgaaaagaaaggacagagaacaagtacatttcaaataaatggaaaagataataaacccaaaatatatttgaaaggtgaatgcttgaaagaaatttctgagagtagagtagtaagtggtaatgttgaaccaaaggttaataatataaataaaataatccctgagaatgatattaaatcattgactgttaaagaatctgctataaggccattcattaatggtgatgtcatcatggaagattttaatgaaagaaacagctccgaaacaaaatcgcatttgctgagttcttcagatgctgaaggtaactaccgagatagccttgagaccctgccatcaaccaaagagtctgacagtacacagacgaccacaccctcagcatcttgtccagaaagcaattcagttaatcaggtagaagatatggaaatagaaacctcagaagttaagaaagttacttcatcacctattacttctgaagaggaatctaatctcagtaatgactttattgatgaaaatggtctgcccatcaacaaaaatgaaaatgtcaatggagaatctaaaagaaaaaccgtcatcacagaagtcaccacgatgacctccacagtggccacagaatcaaaaactgtgatcaaggtagaaaaaggcgataagcaaactgtggtttcttccacagaaaattgtgcaaaatccactgtcacaaccaccactacaacagtgaccaagctttccacaccctccacaggcggcagtgtggacatcatctctgtaaaggagcagagcaaaaccgtggtcaccacgacagtgacagactccctgaccaccacgggaggcacactggttacatctatgactgtgagcaaagagtattccacacgagacaaagtgaaactgatgaaattttcaagaccaaagaagactcgttcaggtacagctctgccatcctatagaaaatttgttaccaagagcagcaagaagagcatttttgttttgcctaatgatgacttaaaaaagttggcccgaaaaggaggaatccgagaggtcccttattttaattacaatgcaaaacctgctttggatatatggccatatccttctcctagaccgacctttggcatcacttggaggtatgtactttaaaatgtatttgggggagggagaaaattttaaaaagaattatctcacaagaatatctcatttttaaaaaatgagataatagagataagacaggaaacatattaatggccaaagatagtaatggaaacaggatacagaaagcttcaaaattggccaactaatgtactaaagtttttgtagggaaaaatgtttaaagtcttaaaatttaagggactattttaaaaatgaaattcagttttaactttcataagacaaaaggaacatgtcagatgtgattgtttttgtggtctgattttctgagttactgctctgggaacaagataaccaccaactttctggaatgtttgtattttatttttattaggtaattcataaaaaataagacataaacacgcctgtaaatttcataaagcttatcataatgtgaaaatcttcctaatgtagcttagttgcatgataaacatttgttttggagttctctgttatttatgtatgaataggtagtctctaagattccttagaaatttttttaaacccagaaatagtcctaatttaaaattttctgggcactttaggtttaggggatgcgtcctaaatagatagtgttggtagttgtaaaatcatgtagttttatgttgggaaggcaccttagaaattcttatcttttgtaaatgtacagtaatttgcctgtggctacagagacacaggaatagtgcccggttttcctaaatcccagtctagtactttatttgctgtatcacatttcacttatgtgtccttgctttctcctttttcatgtccttgtctttatcttttcacccctgtaattgagaaggatggaacataaacactgaaaacatgagagttctgggaacatctttagaaatcagaatcagtcatagttgcagttagattttgctaggaccctcaaattatttcagcgagttactgagccgttttcatttccccttaggcttcgtttttgtgtgtcttttaatatttttccaatttctttaaaaatcacacttttttggtttcctttatattaattacaatcagctagaaaaaaaagtaagtactctctataaaggaattcatttattaatacaaccagtcatagtttgtttgaccaagttttttataactcatcttttgatttgaaataaaatatcatcactccattacacattcaatagagacagctgaaaagtacaatttctctgcagggcctgcaatgaaggatttgcagaatcctgcagggaatcaaggaactcttcattacaattcatggatttataggattactctgcacttttctgctttcttcattgagagcggtcccaaaatgtatccttgactgtcctgcaggtaacttctttcccactggaaaagttactatgtacaaatactttaattaaagtgacctggcagttgtggaggccgacctttctgctctttgtattctaaaatggagggtaggctcaactgggaagcactcttctctgaactctccaggagagttaggcactggtcccaatcaagtgttgctcggggccctgttctgcacagctgaatttctggagctgaatttcatgtcttagtatgcactatggtacagtttatattacttgatttcacattttttaatgggaggaaataccttccattaaacattcattttaaactgatacagccttcaaatgtatgctaacgtcttaatttgccaaaacatatttgagagaagcataatcctttctgtctaatggaggcatgggtaaatatgtaaattgatcatgactttagaatgcattttttaaaagcatattgctataaaaagccatgcacgtgaaatgcatttttatactaacactagaatagaatacatctgatggttaggagttaagaatgccaaagatgcatgtatgatctttgttattaatgttaaggctgagcaatattggaaaacttgtctcatacactcaatagggcctctttttccctccacaccatccattcccttatgcccatcctcccaggccctgattctgtgcttcattttcacattgaactgatagttgtcctccacagtgctgccagaaagattctcctaaaatgcccctctatcctgtgaatagtctgactgagctaagggacttggtaactactgcagcaaggagcggggaaagcatttgtcacctgtagatcacattcatggaaagtacttccctttacaacccatccagtactggataaatctcagaggacttaatatacataccctttaatgctcttctttaatcttttattttggtacagcgcattctggcttctgcctttttctctcatgccaccttcatctctttctgtacctctacaccccttccctccagtcataaaacactggatgtggtttctgggaagaaatgtgtactcctgcacactgttctgtttagcatatgtgtgccccttgcctttgatcagcaacccccatactcttaacttgtcctttgagactccagcaaagctctgatcctcattcccgagccaactcagatgtccctcccttgtcctttcctctcttacagctccttgagaacacagacagattctagtttacctctgtgtccccagctcctttcacatagtctaacacatagaagatgctcaagtattttttgaatgaatgcttgaatgagcagacttaccgtgcatgtggtgtgttcctccctggtgttatttccattttaaaataaggatactttaaagtcattgtttgaccacagagaatgaggacaaacttttccttgcaaataaatatttatttgctttctcctgtgacactaaagatctctaggaattactatggggtatggtctgaaagtgacagacactttccccctcttgggacatccctgcactagttaacatttcccctctgatttccccttgacctgctctgtccaggtcagaggattcatagtgcgataacacagtggagaaagtaatggtgtcacaagtggatatgggaagttaagaagctgcagcaactttttggctagagctttctctttcacagtgttcatttttccaactgaatgctgtcaatagaaagcattgtctttcaggtgggctcacgcctcccagcactttgggaggccgaggcaggtggatcacctgaggtcaggagttcgagaccagcctggccaaagtggtgaaaccccgtctttactaaatatacaaaaatgagcccggcgtggtggcgggcgcctgtaatcccagctactcaggagactgaggcaggagaatcacttgaacccgggaggcggaggttgcagtgagccgagatcgcgccattgcactccagcctgagcgacaagagcaaaactccgtctcaaaaaaataataataatatacaaaaattagctggatgtttgggcgggcgcctgtaatcccggctactcgggaggctgaggcagaagaattgcttgaacctgggaggcgaaggtttcagtgagccaagattgctccactgcactccagcctgggtgacagagcaatactctgtctcaaaaaaaaaaaaaaaaaaaagaaagcattgccttttacatacagagttgtttgagatttaccttccacctctgttagaagaggaaattatttttattttatagcctttgtctacaccataatcaaccactaagttcatttaagtagagtgaaaatgtcaacaaagtattcagttacacaaagatatatagtgaattccattttaggacatgatatttaatgcagttaagtaaatttattttgaaatacgtttttagtattttttaagaatgtgtaaaacgtttagtacctccacacacaatgtttagaaacaaacatgaacacagagagatttgtctgttgataagtaactaatatggtattgtcctttttttttttttttttttgagatagagtctcacactgccgcccgaggtggagtgcagtggagcgatctcggctcactgcaacctctgccctctgggttcgagctattcttctttctcagcctcccaactagctgggattacaggcgcccgccaccatacccagcttagttttagtagagatggggtttcactatgttggccaggctggtctcaaactcctgacctcgtgatccccccaccttggcctcccaaagtgctgggattacaggtgtgagccactgcgcccagctgatattgtcctttttctaatattttactattcattgtagaatttgaaaactacactaatgctgttaaagttttattagtattaactttattcatcatccagttgttcatgttttgaataaccaccatttggatgcagaatgtttttgtccgtttggaaaggtcttactagatttgtaagatgtttttggtttaatttaattaattaattaattaattaattaatttagagacagagtttcactcttgtcgcccaggctagagtgcaatggcatgatcttggctcactgcagcctctgcctcctgggttcaattgattctcctgccttagcctcccaagtagctcggattacaggcatgcaccaccatgcccaactaagttttgtattttttgttttgttttgtttttgagacagagtctcgctctgtcgcctaggctggaatgcagtggccggatcttggctcactgaaagctacacctcccaggttcacgccgttcttctgcctcaggctcccgagtagctgggactacaggcacccaccaccgcgcctggctaattttttgtatttttagtagagatggggtttcaccgtggtctcaatctcctgaccttgtgatctgcccacctcggcctcccaaagtgctgggattacaggcatgagccaccatgcccggccctaagttttgtatttttaatagagatggggttttgccatattggtcaggctggtgtcgaactcctgacctcaggtgatctgcccacctcggcctcccacagtgctgggattacaggcgtgagccaccgcatctgacctcattttattcttttagaaaatttaaacattttcaggtttcttgtttttgcaaaagttaggatttttccttcaaaactcctttatcacatttaataacaattatctatttctctatatttggtccccaaaattttcctaacagatattttggaattaggttaactttataaagtcttcatgaatttttgccttatcaaccttacaatgaaacattctcattttataaacttatatggcatttaaaatgaatatagccccttttaaaaaaaaatgttaggtgcgtgttatgcctatgaatgaagaagtttttcttttaaaggacatataataccaaagtcttacaaaaccatattataaatactggagtcctaatgaggacaagaaacacagcccttcagtttagtagagtgaatatgaatgtgtatgtgtatgtatatacatatagatatatatggatttctttggttttcctttcaggtatagacttcagacagtaaagtccttagctggagtgagcctgatgttacggttactgtgggcaagtttgagatgggatgatatggcggccaaggctcctccaggaggagggactacacggacaggtaagggggaagggagttattttctaatttaagtttaaaagctaaaatcacaggccaggcgtgggcgctcatgcctgtaatcccagcactttgggaggctgaggcaggtggatcatgaggtcaggagatcctgaccatcctggctaacatggtgaaaccccgtctctactaaaaatacaaaaaattacctgggcgtggtggtgggctcctgtagtcccagctactcgggaggctgaggcaggagaatggcgtgaacctgggaggcggagcttacagtgagctgagattgtgccactgcactccagccagtgcgacagagtgagactctgtctcaaaataataataataataataataataataataataataataataataaaatataatgcttgttttttagaaatacagttttggccatgtgtggtggctctcacctgtaatcctagcactttgggaggccaaggcaggaggatcacttgaggccaggagtttgtgaccagcctggacaacataacgagaccttgtctcttcaaaactctaatttaaaaagaaaaaaatcaactaggccttgtgtttgtagtccctgccacttgggaggctggggccaggaggattgcttgagccaggagttcaaggttgcagtgactgtggtccactaatgtcttccagtctggataacagagcaaaaccctgtctcttaaaaaaaatttttttttcacatacagctttgttgaagtttggcacatgctataaaatcccaggggccagaagggaaggttcagattataaagtgagtcacttatgtgtgaaccagtctacattttttaaaagatatttatgattgtttaattaaaaatttaaactaagacttctggaggcctgtgcttgctgcttctgtcctaggctttttattattttgattgagtattgccaccaggagctcagctatacccagcagcattttgtttcgtttaggaatttgcagcgaggaagaagctcagtattgttgcagtctagcagtgatcctgctagatgttagtgatcctgttaattaagtcaggtgtttccaaaagtttattccacgtgtgtctctttttgaaagcaccagatgtacctttttagtctctgagtatttcagttggttattaatactattgaattaaatcaccatagaaacatccgaaactgaaatcacaacaacagaaataattaagaggagagatgttggtccttatggcattcgatctgaatattgtatcaggaaaatcatttgtcccattggagttccagaaacaccaaaaggtaagaaatagaattctattctttcatgattaacctgttaaccatgtattttatgaattgaaatttgatataattttttcttctctgttcaccttttaaaaaagacatattttacaactaccaaattttgaaaatgatattaaagtaataaacatatcaagattctggtagacacacatcgatgcctataagccttgttctaagcacagcaaagggctataataatacctcttgtaattaagatgtgagacattgattgaccccagaccagcagctcctggagagcagccatctcgtctgtctggtttattgaagtcacggcagctagtaccgagtctgatatgtaagtgggtcaataaaggtttcttaaggattaaaactactgtgaaatacttcagtgctcaaggtagagataatccaagaggcataaagagttactcaaaaaatgtttatagagcaccagtacaataggcactgggtggcaaatacatagaagaatgatatttggcccctaatctcaaggaagcaaagtaaagcttatagtattataatatcagtgttatatgtgttgcagtaagctaagagagtaatattggaaaagaagattaacactaatttatagataattatgaatgtctacttagaaaattcatgagaattaaaagtattagcactaataggagttcattgtagtatccagattgaaaatatataaattccattttattttatataaacaataaaaatatttaggaaaaaacctagtaagaaatatataaaaggccaggtacagtggctcacacctgtaattccaggactttgggaggccgagacaggtggattacttgagtccaggagttcgagcccagcctagacaatgtagtgaaaccctatccctacaaaacatacaaaaattacaaaaatattggtaatgtgcatgcctgtaatcccagctactcaggaggctgaggcccgagaattgcttgagcctgggaagtggaggttgcagtgagctgagatcacaccactgcactccagtctgggtaacagattgagaatccgtgtcaaaaaaaaaaaaaaaaaaaaaaaaaagaaatacaggccaggcatgtggctcaagcctgtagtcccagcactttgggaggccgaggcgggcagatcacttgagatcaggagtttgagaccagcctggccaacatagcaaaaccccatctctactaaaaatacaaaaaattagccaggtgtggtggtacacacgtgtagtcccagctacttgggagggtgaggcgggagaatcacttatacccagggggcagaagttgcagtgagccaagattgtgccactgcattctagcatgggcaacagagtgagactccatttccaagtaaataaataaataaataaataaataaaaagataatgtccttagatagaaacgtagtgtttttataaaagttagttctccccaaatgtatacaattaatttttgaaacttgattaaattaacttgggagttcttcttggagaataacctttttgaaaagagtaccaatgaagtaatacctgttcctagtagatgataaattttagcttacttaaaacagcggccaggtgcggtggcttccgcctgtaattccagcgctttgggaggccaaggcgggtgggtcatttgaggtcaggagttcaagaccagcctggccaacatgttgaaaccctgtctcttctaaaaatacagaaattagcgggacatggtattacacacctgtagtcccagctactcgggaggccgaggcacgagaattggtaaacccaggatgggggtgttgcagtgagccgagatcacaccactgtactccagcctgggcaacagagcaagactctgtctccaaaaaaaaaacaaaatcacaaggtcgtcctggcacagaaacagctctgttgatgggcagagacacagatgggagatgtacctggcaggccttcagtctccttgaccccacagcctttgatgcaaaccactgcagtcccctaaaatcacttctctttggcttgtatccctttgtacaattcaggtcctgctttcatttctgtttccttctgctgcttccttgtgattgaatatatgggaaggttcaatgcttgtccctccctgctttttattttttaaatctttttatgaggagattttatctattcttaggtttcacatctccactttatattggtaactctcaaatcccccttctctgtgcggtgatagggaaacacatgttgtacacccaagtgtgagaagaacatgctaggcttttgtaggaagttgaattcatgttggggtccagaggatgaattgacattagtcagatgagcggtggaggcttggaatagtgctccaggtggaagaaacaggttgtataaaggctcataagccttgtattttgggggtcagcaaaccacagcccatgagccttggcctaccctgcttttataaatgaaatttgattggaacacagccacatttactcacttacgtattgtctttggctgctttcatgatacaaaggcacagctgagtagctgcagcagagaccatctggctatttaagaagtttgccaaccactttttcatgatagaagatgccagaagtactttaattttagaagcaatattgcttaaaatattctgatttcctttccaaagaaacgcctacacctcagaggaaaggccttcgatcaagtgcactgcggccaaagagaccagaaacgcccaagcaaactggccctgttattattgaaacctgggtagcagaagaagaactggaattgtgggagatcagggcatttgctgagaggtaaggaaatggttaatacctggtcagctatttgaagattttatcacttcagaatcaataaattactttttttttttttttttgagacaggatcttgctctgtcacccaggctggagtgcagtggcacaatcttggctcactgcaacctctgcctcccaggctcgagtgatcctcccacctcagcctccccggtacctaggactacaggtgcatgccaccacgcccagctaatgtttgtattttttgtacagagatggggttttgctatgttgttcaggctgatcttgaactcctgggctcaagcaatccacccaacttggcctcccaaagtgctgggattacaggcatgagctaccctgcctggggtaaaagaacactttaatcatttattcagtgcagtaaagtcctagcttgactttactccacctttgattttaagtgctagctgtaaatagtttagtaaggtcctctctctctgtctttttttttttttttttttttttttttttgaagcagagtctcgctctgtcagctaggctggagtgcagtggcatgatctcggctcactgcaacctctgcctcctgggctcaagcaattctgcctcagcctcctgagtagctgggattacgggggtgtgccaccatgcccggctgatttttgtatttttagtagagacggggtttcaccatgttggccaggctggtctcgaactcctgaccttgggtaatccacctgcctcagcctcccaaagtgctgggattacaagtgtgagccaccgcgcccggccctctctcttatttttaatgtgttgtccatttgtcgatttctaatgaccataaatgttttatctttattttttattttattttatttttgagacagtttcactctgtcccccaggctggagtgcagtggcgcgatcttggcttactgcaacctcccagattcaagcaattctcctgcctcagcctgccaagtagctgggattacaggcatgtgccaccacgcctggctgtttttttttaagacggagtctcgctctgtcatccaggctggagtgcagtggcacaatctcggctcactgcaaactccacctcccaggttcaagcagttctcctgcctcaggcaggtggccaccaccatgcctggctaatttttttgtatttttagtagagatgggtcgaactcctgatctcaagcaatccacctgcctcggcctcccaaaatgatgggattacaggcatgagccaccgcacccggcctgagccactgtgcccagctccgactaacttttgtatttttagtagagacagggtttcaccatgttggccaggctggtcttgaactcttgacctcaagtgatctgcctgccttggcctcccacagtgctgggattacaggcatgagccacctcgcacaaccaaatgttttatttttaaattgagataatatcatacctttgtatgatgtgaaaatcaaccagatttcactcttattagatgccagatgcctaacaggctagtttctgataagtttctcctttttttcctgcagagtggagaaagaaaaggcacaagcagttgagcaacaggctaaggttagtgaacagaagaaggcagaggacatcaaggcccaaatggaggctctttcaaaacaaaagcacttgacctcccatcagcagggggagttggtgctggtcccacttgacaacatacatacattttttagccaaattcatgcacacccatgcacagtaatgatacattcttgtgggttttggtgtttatttttttgagacagtgtcttactatcacccaggctggagtagatcacagctcaccgagcctcgacatccctggttcaagcggtcctcagcctccctagtagttgagactacaggcacacaccaccatgcccagctaatatttgtattttttgtagtgatagggcttcgccgtgttccccaggctggtcttaaactcctggactcaagcgatccacctgcctcagcctcccaaagtgctgggattttgggtgtgagccattgcacccatccaggttttttttttttttttttttttaagtgtatctcacgtctatcttattgtcattatttgaaaacagctctgtgggtacaccaagctgtggttttgtaaaaagtatacatatttggaggacatctgaaataagatttctattatttattatctttagagtttcataagtaatttctgaaaataattttttcttgtgaatttccaatctggaaaatttctgtagtctatgaaaaagcaaagtatgctaaaactccataagagtttgttgtaattgattattataaagctactgatggtttcttagtgttttcatactataaataatgtgccatggccaggcacagtggctcatgcctgtagtcccagcattttggaagtccaaggcaggaggatcccttgagtccaggggtttgagaccagcctgggcaacatagggagaccctgtctctaataaaagaaaaaagcaaaattttaaaaataaaaatacaatgtgccatatgtgcctaaacattgaggacctgaataaaagatgattaccacttattcctattgagaaaatactgtaagagtttttaccaacttcagtatataaacattgaggatacaagtgagtagatatatctatatacagtattattaacatagttatacataactatttaaaaatcatatataaaccaaattatttgtttcaaactagttttccctttcattttataaaacattttttcaaattcttgtgtatctttcagtttactataggtccttatcttcacttacatcaaagtttgagatgatagcacttttggattctatgtatgatgctgtctgtcacaggaaaccaatcactaaacccaaatatctataacaactggctagttgtattgttttttattttattgggtgtgttttctcatctctgcaatgtaacctaacatattacttttttttttttttttttttttttttttttgagacaaggtctcactctcttgcccaggctgctggagtgcagtggcacgatcatggctcaccacattctcaatctcctgggctcaagcaatctacccacctcagcttcccaagtaactgggactacaggcatgcaccaccgtgtctggctgatttttgtgttttttgtagagataggacttttgccatattgcccaggctagtcttgaactcctgagctcaagcgatctgcctaccagggcctcccaaagtgctgagatagcgagcaccactgcatttggccctaatatactacttttttttttttttttttttttttttgagatggagtctcactctgtcacccaggctggagtgcagtggcgcgatctcggcttactgcaagctccgcctcccgggttcacgccattctcctgcctcagcctcccgagtaactgtgactataggcgcccgccaccacgcctggctaattttttgtatttttagtagagacggggtttcactgtgttagccaggatggtctcgatctcctgacctcgtgatccgcctgccttggcctcccaaagtgctgggattacaggcgtgagccaccgcacccagccagtatattactttaaaaaatttatttaagatgcttatttatgaatatagctaacacttcaactttgaaggcatatcctcctataaataagtactaatatatctgttctatttctttgcctcctttttttttagagataggggcttgctctgttgctgaggctggagtgtagtggtgagatcatagctcattgcaactttgaattcctggcttaaggtgatcctccggcctcagcctcctgagtagctggagctacagaaacactaccacacccacctttgcctccctctttttttttttctttctttttttaactgatttaatcagatgatgtctctaagagttgaaaactaagctctttttcttctgaggaatgagaaattgtgtaaagtactttatattatattcaggtatataggataggtacaaaagtagtcctaaaaaaattggacgtgatgtcataggtgagcaggaggctcacctatgtcaaaggcaggagatagtggtgcaggattggaatttgattttagcagacatcccaacatcacccttaactagctctgtggccttgggccagttacacaacctctctagtctccgtttcctcatcttataagataatgaaggtaaagcatctgccaccaggtttgaaataaatttcacctgttgttttacatgtgtgtggttatattgttacttatcacaccactgttgataagctgttagaaaagtttagcaatctataataaaagatatacagaatatctttaatacctgtagttttaaagattgtattatactactctgtatagtataaagtatttttctgtaaaaatatttgaatgtataatagaagaagtctagaaaaacttttataattttcagcttgcttgattgcaggtttgccaactttaataatagtgtcattaactattgacatgtttttatagttggataaattaatattacagtgaaacagaaacctttcacagctccatttgttctcagctctgaatctcaccgctgagcagcatggtgtttctgtctccaataagcttacccacatctctgttgttttcagtctgaaaccttggatgtttgtacaagccagaaaaacttgttataaaattttctgctatgaacagcttagtacttttaatgtaatatatgtggtatagagacatgaaaatactgccttcatagataggtaccttggaggaattaaaaatatatatatggccttcatcaagaaattaaattcaggtaatttttttttttttagagatggagtcactctgtcacccaggctggagtgcagtggcatgatctcagcttactgcaacctctgccgcctgggttcaagcaattcttctgcctcagcctcccgagtagttagaattacaggcatgagccagaatgctcagctcatttttgtatttttagtagaggtggggtttcaccatattggccaggctggtctcgaactcctgacctcaggtgatccacccacctcagcctcccagagtgctaggattacaggtgtgagccaccgcagccagccataaatacgggtaaatttatatggacatatattctttttggaagtaaaatacttcagaaatgtagtggaatttcttaaggtgagagaaattgtggacagacttcttgtagaatggtattgtttttatttagaactattttgattcatgtttcctctccttcacttttttagaaacgactggagcagcagaagccgacagtgattgcaacttccactacttccccaacaagcagtacaaccagcaccatctctccagcacagaaggttatggtggcccccataagtggctcagttacaactggaaccaaaatggtactaactactaaagttggatctccagctacagtaacattccaacaaaacaagaactttcatcaaacctttgctacatgggttaagcaaggccagtcaaattcaggtatggaactatcattaagtaaaagattactttggttcaggaaaaagaattttcaaccctttagctactgaaatgaaacatttttttagaagattgtttttcttttgcagccagttgagcaaacaagctgtaacggttggtttgttacaaataatgttcataatattacattagcaaactcctctcttacattatttcactttcaacatttacatagttcactttgagtggagaggaatgtttttattaaaaatacaaaatgagccacatttcatgcattggtgccctttcctagaagtcactacgttgctggttattttaaatctaaagcttattaaatgtcttataccccattagccaccagcacagctgccacatctgctacaaccattgccagcacaggtcagacgttccaaattacaggcaatccagtcactatggcaggaaaagtaattaccaaactgccacttcctgcaaacagcaagattgtcgctgtaaatgtgccagcaacacaaggaggtaagggaaatgtgaagttttaattcacatttgccagatcatactgttgccattatttttcatctccttttcactgatttcagtcctcggatctcacattctatgtagcccactataaaaccctgccacacgtagtttctcctcagcaaccgagcaccacgtaatgctttccaataaagtgatagtttttaattatggcttcatctttttttaaggcgttgttcaagtacagcagaaagtcctgggtatcattccatcaagtacaggtaccagtcagcaaacctttacttcattccagcccaggacagcaacagtcacaattaggcccaatacctcaggctctggaggaaccacaagcaattcacaagtaagaattcttacagacttatttggtttgatgtgttgagcacatcacattatttttagaatgacttcttccaagattaatccaactcagtttcctttgcctattactgaatctgtgacagagtactgatttggaaaaaaatctgttatatttctgataagtgaaaatgatacatgaagtattaatgtctaacagttaatgacacattagtatggtttatgaagaataataattgctttctaggattttataaagaaaatttctttatgtaaaacagtggacagcactagaccacccacggaagtgtgctgtgcaggctcgctaagaaatcaaatttaaaatgctgggccaggtgcggcggctcacgcctgtaatccgaacactttgggaggccaaggcgggtggatcacttgagctcaggagtacagggccagcctgggcaacatggcaaaaccccatctctacaaaaaatacagaaattagccaggcgtggtggtgcttacctgtagtcccagcacctcaggaggctgaggtgggaggatggcttgagcctgggaggggaaggttgcagtgagctgagattgtgccaccacactctagcctgggcaatagagccagaccttgtctcaaaaaaaaaaaaaaaaaaattaaaaagtaatctacagtactgttaactagtttgttatcagctgatatgtgcacatattagatacatcatttctttttttgagacagagtttcaatcttgttccccaggctggaatgcaatggcatgatctctgctcactgcaaactccacctcctgggttcaagcgattctcctgcctcagcctctcaagtagctgggattacaggcacccaccaccatgcctggctaatttttgtatttttagtagagatggggttttaccatgttggtcaggctggtctcaaactcctgacctcaggtgatccacctgtctcggcctcccaaagtgctgggattacaggcctgagccactgcacctggcccagatatgtaatttctttgttactagtatggaaaaggcttaaagttttgtagactagcattgtggaaaaaggtttaaagttttaaatttttgaaaatgttctgaacctaactataaaactgaaaataaaatactttctagtttcccttttaaaactatgaaaggaccaggggcagtagctcaagcctgtaatgccagcactttgggaggctgaggcgagaggatcacttgaggccaggagttcgagaaccacctaaacaaaatggcaaaaccccatctctactaaaaatacaaaaaattagctgggcatggtggcatgtgcctgtagtcccagctattcccagctgcttgggagggtaagggacgagaattgctcgaacccacaaggcagaggccacagtgagctgagatggtgccactgcactgcagtctaagtgacagagtgagactctgtctcaaaaaaaaaaaaaagttcaaagattagctgggccggatgcggtggctcacacctgtaatcccagcactttgggaagccaaggggggcggatcacaaggtcaagagatcgaaaccatcctggtcaatatggtgaaaccctgtctctgctaaaaatacaaaaattagctgggtgtggtggcacacgcctgtgatcccagctacttgggaggctgaggcaggagaattgcttgaacccgggaggcggaggttgtagtgagccaagattgtgccactgtactccagcctgggcgaaagagcgagattctgtctctaaataaataaataagcaagactgtctctaaataagtaaatgaatgaatgaatgaatgattagccggacatggtgccattcacccatagtcctagcttcttgggaggctgaggcaggaggattgcttaagcccaggagtgagccaggctacgatgagctgtgattgcatcactgcattccatcttgggcaacagagtgagaccctgtctttaaaataaataaataaataaataaataatttttaaaaaactatgaaagaacatttggtttctgatcttcctgttatattctgtgggttacaggtatggtctggagcttacagaaagtgcgactccacattttcctgtgagcactagttacagagcagagcctcgctggcacatgctccttccttttattccataggctattttggtatcagtggcagggaattttgtatgatagcatttgaattaagttttctttcctcaaaattccgtctttattctgatgtttaatacaatttaaaatgtaatgttcaagagcccctgtcattcctgtaaacatttttattaatatagaatgtttaaagatcttgtgttctaagtccattatactttaatctttttaaagcattttaattcattgttctttgtgtcatttataggtaatcacagggcctcagattcgccctggtatgaccgtgattagaacaccactccaacagtcaacactaggaaaggcaattattcgaacacctgtgatggtacagccaggtatttatccatccagcattatcattttacatctcaacagccagtctaggaaatacgtaattctctgcatttggcactacatacgagaaatataattttaattagtacttcaaagcatactaaatttctaatccattgtgagctctattcattgatattatttcattttgacattgacagtaaaataggttgaagtatgcttattaaaaatgtaacagaaatcactaataaataaaatatataattgaagtaaagaaaacagtccgtatagcaaaagacagaaaatcaaggagatagcaaagaaacatataaaacaaaattacaaatgcagtgccagatgttcatttattactcttaatgagaatacattaaaactaccattttaaaagttgaagactggccaggctaggtgactctcccctgtaatcccactttggaaggccaagacaggagtatcacttgagcccaggagttcaagaccagcctggccaacatggcaaaatgccatctctactaaaaatattaaaaaattagctgggcgtggtgcctcatgcacctgtaatcccagctacttgggaggccgaggtggaagaatcgcttgaaaccaggaggcagaggttgcagtgagccaagatcatgccactgcactccagcttgggcaacagagtgagaccctgtctcaaaaaagaaaaaaaagttgaaaatgttaaagatttttttttaaaccctatacatttatgagaaatttagctaaaatcaaattactacaaaagctacaaaagataaaaaaactagagatggacacaggcacatgaaataaaggccataaaaagaaagaaaagacaaggatggccctactgatactgggcagaataaaattcaatgtttaataaaaaggaaaaatttatgaaaaagagtcattttttattggcttaaaggtaaaaaagatcagccaggcgcagttgctcatgcctgtaatcccagcactttgggaagccaaggcaggccagatcacctgaggtcaggagtttgagaccatcctggccaacatggggaaaccctatctctactaaaaatacaaaaattagctgggtgtggaggtgggcgcctgtaatcccagctactctactcgggaggctgaggcaggagagtcgcttgaacccaggaggcggaggttgcagtgagccgagattgtgccactgtactccagcctgggcaaaaagagtgagactccgtctgaaggaaaaaaaaaaaaaggtaaagatcatggccaggcacagtagctaaagcctgtaatcccaaaactttgggaggctgaggcaagaggatcacttgaagccaggagttggagaccagtctgggcaacatagggagaccccatctctacaaaaaataaaaatttagccaggcatcctggagcacgcctgtagtcccagctacttggtaggctgagatgggaggattgcttgagcccagacattggaggctgcagtgaagtatgctcatgctactgcactccagcctgggagacggagcacgacctgtttaaaaaaaaagaaaaaaagaaaaaaaagattgcagttaaggtataatcttgaatctttatgaattaagtaacatgtcatattaaagtgtaaaaagcaaaactatttgaaatcaaggagaaattaataggagcatagtaagccacaattaaactatgtatcaacttttgtgccttctgaaatacacattcatttaaaatatttgtaggcttaacccaggcgcagtggctcatgcctgtaatcccagcactccaggaggccgagatgggcagatcacctgaagtcaggagtttgagaccagcctggccaacatggtgaaaccccatctctactaaaaatataaaaattagccaggcctggtggtgggcaccttgggaggctgaggcaagagaattgctcgaactcaggaggtggaggttgccgtgagctgagaccctgccattgcactccaacgtgggcaacaagagtgaaactccatctcagaaaaaagaaaaaaaaaataataattcataggctttttggtggaaaagtagttcttgagtcatagataaaaccttgataaattccaaaaaataaaatgtgtataggccacattctttatagtaaagctagaaattaatattaaaatactatattatgctgtaacaagatgtgttaggaaataaaagacatgaccgggcgctgtggctcacgcctataatcctagcactttgggaggccaagatgggcagatcacctgaggtcaggagttcgagactagcctggccaacatggtgaaaccccttctctactaaaaatacaaaaatcagctgggtgtgatggcgagcacttgtaatcccagctacttgggaggctgaggcaggagaatcactgcaaccttgggaggtgggggttgcagtgagcggagattgcaccactgcactgcagcctgggcaacaagagtgaaactctgtctcaaaaaaaaaaagaaaagaaaaagatattagatattatactaataatcttaacttgcttagaagtatgtgagtacagctgggtgtggtggctcactcctgtaatcccagcacattgggaggccggcgggtggatcacaaggtcaagagatcaaaaccatcctaaccaacatggtgaaaccccgcctgtactaaaaatataaaaattagctgggtgtggtggtgcacacctgtagtcccagccacttgggaggctgaggcaggagaattgcttgaacccaggaggcagaggtcatggtgagccaagatggtgccatcgcactccagcctgagcaatgagcgaaactctgtctcaaaaaaaaaaaaaaaaaaagcatgtaagtacattctaagtaacttttaagttaaagatacatcaaatatgtaattacaaaacaattctcaaatagcagccttaagccttgaagctgcagttaaactttgaggtgattcagtttattcaatacatatttgaacacctactctaggcagttgaaataaatcagtgaataaaacaaaccaaaaatacctctattcttaatcaaaagttagaaacatatataaaacaagtttcgaaagaaaacaagacctgatgcggtggctcacacctgtaatcccagcactttgggagactaaggcagtcagatcacttgaacctattagttctagacatcctgggcaatgtagtgagacccccatctctacaaaaaatttctaaaaaattagccaggcgtggtggcacatgcctgtggtttcagccacttgggaggctgaggcaggaggatcacatgggcccaagaggtcaaggctgcagtgagccacaatcttgccactgcacctccagcctgggtgacagagtgaaaccctgtctcaaaaaaagaaaaaaggaaagaaaatgagggaggaaatgaaagcacaagtaataataattacaaaacagaaaagaccaaaaaaattagaccattattttgcaagtctaatctagggaaaagggaggaatatgcttgttcacagaattaggaatgaaaaagtacaataaaaataaagtgagcttttttaactcaaaaggaactgtagatcacctgaggtcaggagttcaagacccgcctgcccaacgtggtgaaaccctgtctctactaaaaatgcaaaaattaactgggaatgttgacagatgcctataatcccagctacttgaggtcaaggcagggagaattgcttgaaccctagaggcagaggtttcagtgagccaagattgcgccactgcactccagactgggcgacagagtgaaactcacaaaactgaaaaaaagaattttgtataggtatccttgtagtaagactttcagaagtcttactatacatacttaggacgtaaatctatttgaatagcaagacataattaaatattgtgcttataaattgaatgtctcaatgacatatcaacagaagaaatttgaaaagttgccataatgttacctatagcaaggaattacagacttcatggttttacaggtatagttcttggaaatgggtaggaaataattttcttactataaaacatggttccagggcataaggggaaagatagataaaatctttcccattttactaatttagcaccaattctaatatgaaatatagcagggttttttgttgttgttgttttgttttaaggcaatcgtcttgcctaagtagcatttacctgagaaaagaaaggaagatggattatttcagttaatgctgcaggaacaattgataagatttaatatctattatgtgagacaggtagctactaggaaagagaactaatataaaggagaaagtgcaatttataggtgataaatgttttctatatacttagaaaactgacagttgtggtaaattgccagagaaactgtaaatgctggtattactatggatacacagagcctttgttgcataatgccctatgtagctgtaagtatgtgtttgtctgacatgcataagtgaatgtgtagtttccaaaccactctcttctccagggttttgccacttttcttccctggagtcttgaatcccctgtgaggatagggtttgtatgatgaactacccaaccctgccgcctggctgtgcagtgctcatttaatgtacttaaatgaaagtctgccttaaacgaattaattcttagtagtaatactctaaaatagcaactgtcatatattcatcattgactctgtgccagggtgtatgtgttttgtacataagcattcatttaatcttcatataaagcatataaaatactatccccattttaccgatgagaaaattgaaatttagaatgttgagtaatttcccaagctattaatctgggattcaaaccagatttatctgatttccaagtccagatattcatttattcattcaacaattattcagtactacctatgtgccagatgctgttccaggcccaaatggccatggttataaactaatcagacaaaataatgccctcatgaaacttatagtctagtggaaaaggtagataataatgaagtaaattaattatacatatatttaaatatactgtataataatgtatgaattttacacatatatcatgttaaataatgaaaagtactggccgggcgcgatagctcacgcctaatataccagcactttgggaggctgaggcgggtggatcgcctgaggtcaggagttcaagaccagcctggccaacatggtgaaaccccatctctactaaaaatacaaaaaattagctgggcatcatggttggtgcctgtaatcccagctactcgggaggctgaggcaggagaatcggactttgtcaaaaaaaaaaaagaaagaaaagtacttagaaaaactgaggggaggaacgataatgtttagagttgggatttgggaatgatttgcagggagggttgaaattttaggaaggatggcctgagaaggactcactaacaagatgaaatttggataaagacctgaaggaaatgagagagctgtggagctgtgcagatatctgaggaaagagtcttttatgaaaaagaaacagcaaatgcaagggccctgaggcaggagtggacctggtgacattgaagggatgggtagccagtggatctcagggggacccaaggaggacaagaagtgggagtcaaaggagttatggtcagagaggtggagggtgggtgggtatgggttgtgtcttcaggtgtgcacagatcacactggaacttatccctcttcctacgccacactagcttttcctaagatgagatccggccgggtacagtggctcatgcctgtaatcccagcccttagggaggccaaggcgggcggatcacctgtggtcaggagttcaagaccagcctggccaacatggcaaaaccccatctctattaaaatacaaaaaatagccgggcatggtggcgcagcctgtaatcccagctatttgggaggctgaggcaggagaatcgcttgaacccaggaggcagaagttgcagtgagctgagaccgcccctcagcctgggcaatagagcgagacttcacagaccctcggagtacagtcagaaattattacatttttgaatttccattttgatctaaaaataaattgatatatacctattggagatcatctgggtggcttataaaaatgaatcagtaccaatccttttatctgtctctgcttatgatggcaatgtatctgtaccaggtgatctctggaagtgataacttttcatgtattgtttctcaaactgcaatgcaaggacatagcactgggatataggagttctcaaattaaagaccttggccacactatgttatgctgtctttcagttcatcttgagtaaatgaatgagagtaaccaagaaaaatttagaagaaagagtaataatggaaaacttgtactaccagttgttaaagctattataaagccaccaaaattagcatgataccaaaggaagcaacacaaatagttacagaggcattatatgtgggaattggctgcatgacagtggtgtcattttgcatcagtaaatgatactggaataattggcttatagtttggggggaaaatagacttccgtgttacaacatataccaggactaagaacattcttgggaggatgtatctgatgagagaatacaagagaactttacaagcaataattaaagccaaaatttttaaaaagactagtctggccgcattttttaaaattgcaagtttagaaataaaaacgtagatggcaaagtggaaaaaatagtttctaaaaatatgtattaaataagtaggaaaagaaatgggcagtgtgtggagagtgaattcacaaatgaagaacaatgacttaaaacagtttttaatgccaacctgtggtaattgaggaaatttagcactgtgatacatgatactatttgcagttgcctgaatattttactttactggtgatatcaaggtttggcagggttcagtgaaataggcacacagagctggcagtagtgtgaattggaataacctttcaaaacttcaacttagtactatattcctactatgaacccagtaatattttttggagggttactttaaagaaataatcagaagcacccaaaaatggataagcaggaattttaccatggcgttagtttaacaacaacaacaaaaaggtgtgggggaagtattctgaatgtcaaaataagtttcattttacatatgtgcagtaatatgaagtatcattcagccattaagagaaacacaaagatatatatgtgtatccacagatggaaaaaaggcagcgagtaaatattaaaagcttgagaaatttgatgttattcagtagttagtaatgagtctgtaagtgtcaaattagctaccaaaaaattattcttagcaactgttctacatgggggaaaattccacttgcctattctagtttcagcaagttaaactaaaaagaggtttatggaaaactgtagagccattccagttcaacttcattcattcaatagacatttattgaacaattactatgaaagcattatttgggccaggtgaggttgctcatgcctgtaatcccagcactttgggaggccaaggcgggtggatcacgaggtcaggagatcaagaccatcctgactaacatggtgaaaccccatctctattaaaacaaatacaaaaaattagtcgggtgtggtgggacatgcctgtagtcccagctactcgggaggctcaggcaggagaatcgcttgaacccaggaggcagaggttgcagtgagccaagatcacgccaccgcactccagcctgggcgacagagcgagactccgtctcaaaaaaaagaaaagcattatttgagcactctgccctagtattgaggatatagtggtccttgccttcatggctctcccaagctatctgtcaaatagctgtaagagaagcttattataaatgcagttggcccagaatattccagattctttatattttgtttaaaattcatatgaattaattttttattaaattagcacttatttttaatattatattcctaagaaaaggcagccttataaatggcatattttacacattcttttttgtcttccctattatcattttggttttagatttataggaagaattttaattggttttttccattatcctacagacagcagagactggataacggttggcagtgaaaacagactcactgccaaccaggcaggacctttggatgtgggtatatgtctgaatgtatccttaggctctgaatatcccagtgtttttttgaagatggaaaagaatacgttcatgtgaggtgttgaattatttcaattcaaaataatgccaagggtgtataagcattcataatgttttgctgtttgggtaggtgctcctcagcaagtgatgactcaaatcatcagggggcagcctgtctccactgcagtctccgcccctaacacggtttcctcaacacctgggcagaaaagcttaacttcagcaacgtccacttcaaatatacagtcttcagcctcacaaccccctcgcccccaacaaggacaagtgaagctcaccatggctcaacttactcagttaacacagggccacgtaagtaacataagctttattttaactttagaggtgatcttatttattcttgcggtaagtttaaaaacatgaacttattttgatacgtttttaaatgtgctgatttgaagaaatggttgcttcctggagtcaagcagaaatacctcttagacaggatataataaaccccaactactagagtaatctttagacagtgagctaaaacagtgagacagataacccttttaaacaccaaaattttattagttggctaatctccatgagacaaataaaatttgagtacattaagctgcttccttgcaagactcgatattgttagcaagtcttctaatattgattaataaattgaatgcagctcccatcaaaatcccaagaggttttgtttttagtgaaacttcacaagctgatactgaaagtttatatggaggtacaaagtattaagaatatctgtacctttgaagaacaggattatttgccctatatatgataacttgatatcaaaacttagtataggctgggcatggtggcttgcgcctgtaatcccagcactttgggaggccagggcgggtggattgcttgaggtcaggagtctgagaccagcctgaccaacatggtgaaattccatctctgctaaaagtacaaacaaattagctgggcgtggtggcatgcgcttgtaatcacagctactcaggaggctgaggaaggagaattgcttgaacctgggaggcggaggttgtagtgagctgagattgcaccactgcattccagcctgggtgacaaagcaagacttcatctaaaaaaaaccaaaaaacttagtatataatacttcactaattaatatagtgaggtacagacataaggagaggcagatagaccaacagaacagtagagagtgcagaacatgaaccccatgtatgtggacacttgttatatgacaaaggtgacattgcagatcattgaggaagagatgacttttcagtaaatggtgccaggacaattgaatatacatgggaaactgtgaaattggaccattattacctcactctacataaactcaattccaggaggatgaaagtcctaactgtgaaaggtaaaactataatacctttagaagatagaagaatatcttcatagctttcctaaacagatagaaaatgctaaccataaatgaaaagatttataaattcaactactttaaaaataagagtaagaacctctgttcatcaaactcactacagagagagtgaagaaaatgagaaaagaaccaaccaaggactattacatatccagaatatataaagaattactacaaatcaagaaagaaaaaaatccagatagatcaataggaaaaaagacaaacaggcaaggtgcggtggctcacacctgtaatcccagcactttggggggccaaggttttgggaggccaagccaggtggatcacttgaggtcaggagtttcagaccagcctggccaacatggggaaaccccgtttctactaaaaatacaaaaattagtcaggcgtggtggtgtacgcctgtaatcccagctgcttgggaggctgaggcaggagaattgcttgaacccaagaagcagaggttgcagcgagccaagatataccactgcactccaacctaggcaacagactccgtctcaaaaaaaagaaaaacaaaaaaaaaaggacaaaccaacattatgaggaaagaagaaatctaaatgtcccaaattccaaaaaactgctgaactttattaataatgagagaagtacatattaaaaccatatgcttaagagattggtacaaatttaaatgtccaacaaaaccaagagttagcaaagacatagagcagaaagaattctcatgcacagctggtgggcctatcagtcggttcagccattttggaaacttcctggacatggtctggtaaagtcaaagctgtgtatgcccaaggtcccagtataccttctaggtatatccctagagaagttgttggccatgtgagcaccagaatacatggcataaatattggtagcagcattgttcataagaatcaaaaactaagaacaactcaggtgtctatcaaaatcagttagctaagtaaattgtagtatattcctacagcaataaaaatgaatagacttcagccacacagaactatgcagatgattctcacaaatatataatggtaagctaaagaagcaagtagctgccaaaaaaaatacatgttataatttcatttgtataagattcagaaataggcaaaactaagctattttgtgtagggatacagggctgctgcattgcctgcctggagggggcactattcccattgtattctttgtgaatattgctcctgagtttgtgaacctcagtggccttatatatacctaagatacataccgaagtagtaatgaaatacagtgttatcatcaaagtgaggatagtgcttacctctaggggagagggagggaattgaaatccgggtgagtcatatggggacttctaggacactggcaatggtgaccacagtggcggttttatagatgtttactttataatttttaaattatacttggtgttttgtgcattttgtgcataaaaaatgtattttagaaaagcaagagtaaataagttttgagggattcacatgtatatggagcttacttagtacatggactttgcgccatcagttttggtcattgggagtttaggggatggtttttacttttgctttccagttctccagcatgttcctggtattcagggtttctagttgaattacagttctggacagaagagagagcgcctagagaattttaaatttctggacccctttttggtaactgctcagaccttagtgatcctccttacttggtgtttgcattacatatctaaaaccctaagctttttacagtttagcacacacacaccccataggtaatttggcacgtattgaaagacaaaattcaggagatctaggttccttcttttatctcacctttaagttggccagggtacttgacctttctaacctgagtttcttagttgggaatcagaagaatattttctctgcctaccccataaagtcacaagtccattgtgagaatcaaatgaggcagtatctatgaagatgcttttgaaattgtaaaatatgaatataagattatttaaaatcagaattttgtggggactttagttattcaatacctttattttatagattgggaaacttggatctggaggaacagtgttgcttgtggacagataactggctgaccattgggggagcttgaactggaactctggattgttgatgtttttcctactaagcaacataaatattcttactttagcttatctaaattcctgctggtgacattcaaatatgtattttcattatattaaaagataattacacataaaaatgatttaataaaaatgatatacatacagattgatgctttgaacactgtttacatgttgtgttttttccacagggtggcaatcaaggtttgacagtagtaattcaaggacaaggtcaaactactggacagttgcagttgatacctcaaggggtgactgtactcccaggcccaggccagcagctaatgcaagctgcaatgccaaatggtactgttcagcgattcctctttaccccattggcaacaacagccaccacagccagcaccaccaccaccactgtttccacgacagcagcaggtagagctgtgggtttatcggaaatgtcggatgttactactacacgtggctgggctaacagaggccaacaggagaaccagtatttacctttggaaggatatgcctcaagccagtgacctcaacagttgacatagtcagcctcacaacgtctcgaagcttttgtaccctattcttacagactccctgttaccaccaccctctccctcctattaaaaaagagagagagagaaagggggcaaaaataatggttatcttggtaactatgcccacacttactccttgctaagccttgtaggtgctgattcagtcatggaggtgatctcagggagggtgggtaaatccagttcatgacctcagattgagagtgggtccagaaccactttgttgaccttctgctgcaagtcattgtaactaactaccaccacatcatgggagaaaagtgaagcgtggcaattagcctgggccagatgacccagctgatttccagaggctgcaacttactttggaaaccagccctctagagttaggagagtgtacaggggacagccaagaagcagggcccaggcttcccagtttcagagcgtcctgccctaagcgtgtccaaatggagcatttcaaaggcatagaccttctgtaccaaaatacaaaattctcaactttatttactttatttattttttcgagacagggtcttgctctgtcgcccaggctgaagcgaagtagcaccattactgcttactgtagccttgaactcctggacgcaagcaatcctcccacctcagcctcccacgtagcttggaccatagccatgctccactatgctcagataattttttattttttttgtttttgtgtagagacggggtctcactatgttgctcaaacgatcctcccacctcaacgtcccaaggtgcacaggtgtgagccaccacgcctggccagaattctcaacttcagaagatttccttcagattcttctttaaccacagttttatgttccagagtaatagaaatggttcatctttcctttttacaggtacaggtgaacaaaggcagagtaaactgtcaccccagatgcaggtacatcaagacaaaaccctgccaccagctcagtcatcaagtgtgggtccagcagaagcccagccacagactgctcagccttcagctcagccccagccccaaacccagccccagtccccagctcagcctgaagttcagactcagcctgaagttcagacccaaacaactgtttcatcccatgtcccttctgaagcacaacccacccacgcacagtcatccaagccccaagttgcagcacagtctcagcctcaaagtaatgtccaaggacagtctcctgttcgtgtccaaagtccatcacagactcgaatacgtccatcaactccatcccaactgtctcctggacaacaatcccaggttcagactacaacctcacaaccgattccaattcaaccacatacatctcttcagataccttcccaaggccagccacagtcacaaccccaggtacagtcttcaactcaaactctttcatcaggacaaactttaaatcaagttactgtttcatccccatcccgtcctcagctacaaatacagcagccacagccccaagtcattgctgtgcctcagctgcaacaacaagtccaggttctctctcagatccagtcacaggttgtggctcagatacaggctcagcaaagtggtgtgccccagcaaatcaaactccagttacctatccaaattcagcaaagcagtgctgtgcagactcaccagattcagaatgtggttacagtgcaggcagccagtgtgcaagagcagttgcaaagggttcagcaactcagggatcagcagcaaaagaagaaacagcaacagatagaaattaagcgtgaacacaccctccaagcttctaatcaaagtgaaatcattcagaaacaggtaaagttattaagtaaaagcagcatgttcagtagcttgaattattgtgctgtgcagtagaattagtgtttggttgtgttaggtttcctaaatgagacaaagtcattaatgtttaaatttagaagaaacactgaattgaccaaaaaaaatactgaatgactactgtggtgtggaacacttcgttagatacatataatatatagtcagtgcttattaggaatgacctgtattttgggaggactaagatgggaagaatggagttatgagctttaatctttaatataaaacttgagggtttaactaagttttaaagccacttcagacattatagcaattcctttaaagttattgaaagttgtcattccttagtttgcatgtagactatgcaaattatagacagattaaactcatttgcatttctagccacacctttgtaaaaaagtttttgaaaacatattatttcatagcttaagtaaaaagtggcatcatccagcaacatcttgcaatggcacattagtgaaataaagcaatttagatgagttagaattagtctactaaagtgaagtcacacatataacatctgataacattactggcagaaaccatcttttcatctacctatagcttgcttcgctcagcactaggcaggagtttgaatgtggattttaagtgttaccaagttgtgagaccttcattcagttcctaggtctcccattcacagtccgtgaaactcacttatccctccttagctatagcctcttaaaacccttctctttccagccacatgagattattgcaatgattaaatgaggtcataaatgtagaagcactttttacacagcgaagttattttaaagatgtagtattcttatgaaaatgacggtcatatatattatatttaaatgtattattacccagctttactgtgtatctataaactgagaattactacactgtctgtctatccgctaatctttgtataggggagacgagggacagttctttaaaattcattcctgggaagaaagcataatgttaaaaatacggcctttggagaaggatagccaggttaaaatttcagctgtattacttactgtttgtcaaacaaggtggttaatttctttatgtctcagtatcttgtttataaaattattgctatggttcagtgttgttgtaaggaataaacgaggtaatgtcaagtgcttagcctagcacggtacccagcaggtggtaagcacccaggccatctggtagctgctaattttatttatgttacgatataaaattcttacagtttctttaaaaaaacacatatgtgctcaaatttctactgttgttatctgtgtactaacctgtggtgattataaaatatgcgcttttggatttattctgtcctgaaggtggtgatgaagcataatgctgtaatagaacatttaaaacagaaaaagagcatgactccagctgaaagagaagagaatcaaaggtaggggagacgcagggtcttgttgtctgtccgtctcttctctttatcgtgcacacgcacagagttctgagtttatacttgtttatcttgattgaagttcattaaatgagaacacttggcactaatagttactcataactggtttgaaccactcttgacgttttccagtcacagaaagtttttgtctcatctgtagaggcatagaagaatgatgtcttaagcctttcaaaatgaaacgcccagcattacataggttgtgtatttttctctagaatgattgtctgtaaccaggtgatgaagtatattttggataagatagataaagaagaaaaacaggcagcaaaaaaacggaagcgtgaagagagtgtggagcagaaacgtagcaagcagaatgccactaagctgtcagctctgctcttcaagcacaaagagcagctcagagccgagatcctgaagaagagagcactcctggacaaggatctgcaaattgaagtgcaggtaagagggcacatccttttcttctgtgtccagtgtttaacatctgaggttctgcttttttcccttgcctttttaataaagcttaaaatttcagtatgttttctagaacttacatttgtgtacatagagtaaaaagcagtgcagcgtgtgtgtcttgcaaaacaagtcagagcttttataactaaatgtgtagttatattgtattctccagactagcaactctgagaggtgagcttgttgattgaattgttgaaaaactctgagaagagcttttcatgtctatgacatagtctagccaaaagtaattaggagcagagcttcatgagaaaggtacagagacagtgaagtaacgttgaaagaatgaaaaataacatgagtccattaaataagacaaattgcaccagaatgaggtggctcactcctatacttccagcagttggggaggccaagacaggcagatcacttgagcccagaagttcgagaccatcctggccaacatggcgagacctcatccctacacaaaatgaaaaagttagccagatgtggtggcacacagcccaggtactcgagaggctgaggcaggaggatcacttgagcctggcaggttgaagctgcagtcagccctgatggcaccactgcactgcagcctgggcaacagagcaaaaccttgtctcataaacaaaacaaacaaataaaaaatttcttccttgacttgtaaacgattctgtaggtattgctaacctgctttctagaggaatttattaaaaaatgaaagtaggctggctgtggtggttcatgcccataatcccaacactttgggaagccaaggtaggcagattgtttgagcccaggagttcaagatcagcctaggcaacatggcaaaaccctgtctctacaaaatacacaaaattagccaaacatggtggcatacgcctgtagtcccagctacttgggaggctaaggcaggatgatcacttgaacccggaaagcagaggttgcagtgagccttgatcgcaccactgcactccaggaagccgaggcgggtggatcacgaggtcaggagttcgagaccagccagaccaacatggtgaaaccctgtctctactaaaaatacaaaaattagctgggcgtggtggcaggcacctgtaatcccagctacttgggatgctgaggcaggataatcgtttgaacctgggaggcagaggttgcagtgagctgagatcacaccactacactctagcctggacaacagagtgagactccatctcaaaaaaaaaaaagtagacatctatttatacatatatatacacacacacatatatacacatacgtacatatatatatatacacacagacatatatatatatacacacagacatacatatatatatacacacatgtatatatataatttacacataattacacagcttttttaaagagaagtaggttatctcaagcatttcaaggccagacacggtgtctcacgcctgtaatcccagcactttgggtggccgaggcaggtggatcacctgaggtcagttcaagaccagcctggctaacgtggtgaaactccgtctctactaaaaacaaaaattagccggacatggtggcaggtgcctgtaatcccagctagttaggagtctgaggtggggagaattgcttgaactaggaaggtggaggttgcagtgagccaagatcgcaccactgcactccaacctgggcaacagaatgagactgtctcaaaaaaaaaaaaaaaaaaaaacatttcataacatatcttaaacattttaagaaggtgagaaatagaccaggcacagtggctcatgcctgtaatcccagcactttggagaggccgaggcgggcagatcacttgagctcaggtgaaggttgcagtgatgcgaaatcatgccattgccctccaacctgggcgacagagtgagactgtccccccgcccccaccgccaaaaaaagaagatgagaaatagtaagataatattaaccagactaataatactacctatctgtgaaacattagagatcttccagttaaagtcagaaaccagaaaccccagtgatgccaacaatcaacgttattatttagcatttctggaagttctggcaaatatgttaagccaagcaaaagaaacaaagacaaaaaattgaggaaagaagacattgtttttatgtgtggtatgattattacatcaaaaccccaagaaaataattattacaatttataattcaaggctgggcacggtggcccacacctgtaatcccagcactttgggaggctgaggcgagcggatcatttgaggtcaggagttcgagaccatcctgatcaagatggtgaaaccccatctctactaaaaatacaaaaaaattagtcaggcatggtggtgggtgcctgtagtcccagctacttgggaggctgaggcaggagaattgtttgaaccctagagcagaggttgcaatgaactaagatcatgccactgcactccagcctgggtgacagagtgagactaggtctcaaaaaaaaaaaaaaaattcagtaacgtagtcagttacaagataagcattgaacctgcctcccaggtttaagtgattcttcttcctcagcctcccgagttgctgagattacaggcatgtgccaccatgcctggctaattttttgtattttagtagagagggtgtttcaccattttttgtcaggctggtctcgaactcctggcctcaagtaatccacccgccttagtctcccaaagtcctgggattacaggcatgagccactgtgcccagcctcaatttgggtttttatggaagcttcattacatagtcattaatgattacatcattggctgttggtggtcagcttaaccttcagcctctctctctctctctttttctcagaggttgggaggtggcactgaaagccctgagaatcagccccaatcctgaggctctctaggagcctccagccatcagtcaatcattagcattaaaaaaaaatcttattttgcagattctgagggttttaggaattgtatgctgggaaacagggaggaagatcaaatatatatttcacagtatcacaggaccacaaagaggagattggtcatcagtgtttctcaacagaagcactttggcctcttgaacaagccagtttacacactgtagaagtttagcatcatttaaagtgtgccacacactgtttccgttccacattctacacagagtgggaaaatagttgtagtttatatcctttatgtataaaaaagttggtcagttgcccttcaaagccaacaaatgaaaatgatctctaaatctaacccccaaagacaatcatttttaaacaactttagaatatatcttgtatatattactttaatgtatgtattcatatataaacctgttttatacagaaacaatctaacgaggaagaaaagttatactttgagaaaggaggagccaggtgcagtggttcatgcctgtaatcccagcaccttgggaggccaaggcaggtaaatcacatgaggccaggagttcgagaccagcctggctgacacggcgaaaccccatctctaccaaaatacaaaaattagctgggcatggtggcgcacaactgtagttccagctactcaggaggatcaggcaggagaatcacttgaacccagaaggtggaggttgcagtgacccgagatcatgccactgcattccagcctgggcgacagagtgagactctgtctcaaaaaaaaaaaaaaaaaaaaaaattattgctaaggtaatttgctttgagtttgagaccagcctgtccaacatggtgaatccccgtctctgctaaagcttcaaatatgtatatgtactggcatattttaaaaataaattttaattttataagatatgtgattgcttccttacatctgcctattcttatttctgcctcttttttttaataggcttttttttttttttttggaaatggagtcttgctctgttgttcaggctggagcgtgtagggccatctccgttcactgcaacctctgcctgctgggttcaagcaattgtcctgcctcagcctcctgagcatctgggattacagacacctgctaccacgcccagctttttttctattttcagtagagatggggtttcaccatgttagccaagctggtcttgaactcctgacctcaagtgatcctccctcctcggcctcccaaagtgctgggattccaggcgtgagccaccacgcccagccaataggcttaattttttagagcagttttacgtgcagaacgtacagttcccatattattcctcccccacccacacacaatttcccctattaatgttagcatggcacatttgttagaattaatgagccaatagtgattattattattattaacgaaagtccatagtttacattaaggttcactcctcgtgatctgtgggcttggcaaatccctaatgtaacgtattcatcatcacagtatcattcataatagttacactgccctaacaatcccgtgtgccaccttcttgttcctcctctttccccctgtgctagtctttttgataaaataatttgttttttaataaagcttataccttcattacatctttgaatatatcaataaagtttttgtcaaattgttctttactttttttttcgagatagagtcttgctctgtcgcccaggctggagtgcagtggcacgatctcggctcactgcaagctccgtctccccgggttcacgccagtctcctgcctcagcttcccgagtagctgggactacaggcgcaggctgcaacgcctggctagttttttgtatttttagtagagacggggtttcaccatgttagccaggatggtctcgatctcctgaccttgtggtccacccactttggcctcccaaagcgttgggattacaggcgtgagccaccgcgcctggccttttttttttttttgagacggagtcttactctgtcacccaggctggactgcaatggcgcgatctcggctcctgcaacctcctcctcccagtttcaagcgattctcctgcctcagcctcccaagtagctgggattacaggcgcccaccactgcactcggctaatttttttttgttttttgaagagatagggttttgccatgttggccagcctgatttcaaacccctgacctcaggtgatccacccactgcagcctcccaaagtgctaggattacaggcgtgagccaccatgcccggcccgtcaaattgttctataattttttttttttttttggagaaagagttttgctcttattgcccaggctggagtgcaatagcacgatctcggctcactgcaatctccacctcccaggttgaagcaattctcctgcctcagcctcccgagtagctgggattacaggcgtgcaccaccatgcccagctaatttttttgtgtattattcggagagatggggtttcatcatgtttgccaggcttgtctcgaactcctgacctcaggttatccacccacctcagcctcccaaagtgctgggattacagctgtgagccactgtgcctggctgtataatttcatttggagtgaattcagattagaccattgattttattggcttttttatcttttttctttttcttttcttttctttttttttttttttttttttttttttttttttttttttttgagaagcagggccttgttctgttgcccaggcgggagtgcagcggtgcaatcacagcacaccacagcttccacctacccagatcagtcagtccttccgcctcagcctcccaagcagctgggactacgggtacgggcgaatgccatgccaccctgtctggctaattttggggtgttttttgttgttattgttgttgtcgttgtttttttgtagagacaagtttttgccatgttgcccaggctggtctcagaatcctgggctcaagcaagtgatcctcttgcctcgacctcccaaagtgctgggattacaggcatgagccaccgtactcggccctggttgtctttttttcatattacatgttttccttttcaaacatttaagttttgcaagcttattttgagtgagaggagttttgtttttgttttctctcccaaagcccagtggagcccagtcaacccttaacttccaacagggagccggctcttatcactgcctcacacacagcatgttagtctcccttaccccccagaaaccctaatgttagtgttcggccacctcttcttccttctgaatctggagcctagcaggcctgcagttttagtcctgctcacagttttgtgtctctattccattgagattgttgtaacttatttaagcatgactatttcttctcagtttctcttttttatattttattttcatttgtatgtttttgaagggagagggaagatcaaagtgtgtgcccactatacaatcttggttttcccaaaatccgtcccatgatgttataaacatatgaactaggagatgaaactcaaggttttctttctaacctaggaagaagttcagtctctctctataaatagagaagggctgttgaataatttgtcacctgacttctcttttgactttgtaagaccagatagtctatagacagaaacagattcattaaaccagggccattcaggtttatttagtaaaatatttgtgatatgtttaaaagctttggccgggtacggtggctcatgcctgtaatcctagcactttgggaggccgaggcgggcggatcacgaggtcaggagattgagactatcctggctaacatggtgaaacctagtcactactaaaaaaaatacaaaaattagccaggcatggtggtgggcgctacttgggaggctgaggcaagagaatggcatgaacccgggaggcagagcttgcagtgagcccagatagcgccactgcactccagcctgggcgacagagccagactctgtctcaaaaaaaaaaaaaaaaaaaaaaaaaaagcttcctgaggtactcatgtaatgattgttactagtgtagttggtgcatagggatgggtgaccctgcaaaaaaggggcacagcaaactctatttcaggtacaaatggaccttatctttaggcaaatccttgaaattttggcaggggggaatcaggttttcctgtgagttttttgtttttggcttttcatagacatctacatgaagtctctgctttagaatcttaaaactgtagcttcagaggccgggcacggtggctcatgcctgtaatcgcagcactttgggaggctaaggctggaggaccacttgagctcaggagttcgagaccagcctggctaacagggcgaaatcctgtctctactaaaaatgcaaaaattagccagacatggtggcgggcgcatgtaatcccagctacttgggaggctgagggaggagaatcacttgaatcctgaaggcagagattgcagtgagccgagatgacaccactgcatgacggaatgagactccatctcgaaacaaaaaactgtagcttcagggattcacttaaattatcatttataggccaggagaggtgtggctcatggcctgtaatccaagcactctagaaggctgaggcgggtggatcagttgaggccaggattttgagaccagcctgggcaacatggcaaaaccctgtttctacaaaaaagaattctctgggtgttatgatacacgcctgtaaagacagggtctcgggccaggcgcagtggctcacgcttgtaatcccagcactttgggaggccgaggcgggcggatcacgaggtcaggagatcgagaccatcctggctaacacggtgaaaccccgtctctactaaaaatacaaaaaaattagccgggcgtgatggcgggcgcctgtagtcccagctactcgggaggctgaggcaggagaatggcgtgaacccgggaggcggagcttgcagtgagccgagattgcgccactgcattccagcctgggagacagagcgagactccatctcaaaaaaaaaaaaaaaaaaagacagggtctcactttgtcacctatgttggagcacagtggtgccatcatagctcactgaagtcttgacctcccaggcttaagggagcctcccacctcagccttccaagtagctggcactataggcatgtgccaccacacctggctgatttttgtatttttagtagagatggtgtttcgccacgttggccaggctcgtcttgacctcctggactcaagcgatcttccagcttcagcctcccagagtgctgggattacaggtgtgagccactgtcctggaccaattttttttaaagaaggaaaaataaaattaattcagttctacttaaaaaaaaaaaaaaaaaacggtcaggcacagtggcttacgcctgtaatcacagcactttgggaggccgaggcgggcagatcacgaggtcaggagatcaaaaccatcctggctaacatggtgaaaccccatctctactaaaaatacaaaaaaattagccgagtgtggtggcgggcgcatgtagccccagctactcagtaggctgaggcaggagaatggcatgaacccaggaggcggagcttgcagtgagctgagatcgcaccactgcactccagcctgggagatagagcgagactccgtctcaaaaaataaacaaaaaaaaagctctttaaaggaaacgtgcccggcacggtggctcacgcctgtaatcctagcactttgggaggctgaggcaggtggatcacctgaggtccggagttcgagaccagcctgaccaacatggagaaaccccgtctctactaaaaatacaaaaattagccgggcgtggtggcacatgcctgtaatcccagctactcaggaggctgaggcaggtgaatcacttgaacccaggaggcagaggttgctgtgagccgagatcgcgccattgcactccagcctgggcaacaagagcgaaactccgtctcaaaaaaataaaaaaataaaaaaaataaaggaaacgtgggctaatttattttcctgagagactataaatcatgatgaaatgttttgggaatatttttggtactttaaattattgtagaaatttataaatgtgtcggattttggccaaagtggctcacacctgtaatccaagcactttgggaggccaaggtgggcagatcacctgagggtaggaattgaagaccagcctagcctacatggtgaaaccctgtctctaaaagaatttttaaaaaaatttttaagtcagattttaagaaatattcttatggccgggtgtaagtggctcatacctgtcatcccagcacttagggaggcccaggcaggcagatcacttgagcttaggagttcagttacctgaacaacacagcaagactccatctcctcaaaaaaattagctgggcatggtagtgagcacctgtagctacttgaaggggttgaggtgggaggatcacttgagcctggcaggtcaaggctacagcaagccgtgtttatgtcactgcagtccaggcagggtgacaaagtgagacactgtctccacataagaaatactcttggtcatagctatgatttctttacaccaagtttgtttgtggatgccaatcacaatgggtttgttcctagggtaataaggtttgctttgatcatttccaagagtaagttgtaccactagatagcagaagaggtgtgcttaaaaagtatggcaaatgcatattgaggaagtagtatgttggccagacacagaggctcacgcctgtaatcccaacactttggaaggccgaggcaggtcacttgaggtcaggagttcgagaccagcctggccaacatggtgaaaccccatctctaccaaaaatacaaaaattagctgagtttggtggcacgtgcctgtggtcctagctaggtacttgggaggctgaggtgggaggatcacttgagcctgggaggtgaagggtacagtgagccaagactgtgccactgcactctagcctgggtgacagagtgagacccactctcaaaaagaaaaaacagagtacagtaaagaagctggccaaaaccaagatggcgatgaaagtgacctctggttgtcctcactgctcattaaaactttttaaaaaatatatgaaaaggggccaggcagtgtggctcacacctgtaatcccaggactttggaagtctaaggtgggtggattgcctgaggtcaggagttcaacaccagcctagccaacataatgaaactctgtccctactaaaaatacaaaaaattagctgggtatggtggtgggtgcctgtaatcctagctagttgggaggctgaggcaggagaatcacttgaacccaggaggtggggaggttggagtgcgctgagattgtgccactgcactccagcctaggcaacaaagcactttgggaggccgaggcgggtggatcacctgaggtcaggagtttgcaaccagcctggccaacatggcgaaaccccgtttctactaaaaatacaaaaaaattagctgggtgtggtgttgcacgcctgtaatcccagctacttgggaggctgaggcaggagaattgcctgaacccaggagacataagttgcagtgagctgagattgcaccattgacaagagcgaaactgcatctcaaaaaatatatatatgaaaagaaagttatcttttaaaaaaagaaaatagtgcgttatgttgcactactctccctgcagtctgaaattctagacataggagcatcataataaataaggcaaatctgcctcttttctgctttatgctggtcagaccacattttgagtctcaaggccagttcatgtccagtctcactgtaaggacagagagcaagagcaactagaagaaagcagccagtgagagaggatgcttgaaatcaccttctgagcaaccacagaaagagcccagatgggacaggggcaagccaggagggacgctcttcctagccacttggctcatctttcagtcagctctcctttgaagataactagcagctttctagttgttcttacctagtcttcattttgtttctagttgtcttagttgggtttaagatataagaaaactcttgtttgcaactaactaaaactctcacgttaggctgaactgtggagctactttgacaagagtgggtagtgtaccatcttctggccagatcacacatttacatgactctaatgatagtcttgtattgtctttaattgataacaggaagagctgaagagagacctgaaaattaagaaagaaaaagacctgatgcagttggctcaggccacagcagtagctgcaccctgccccccagtgacaccagctcctccagcccctccagcccctccaccttcacctccccctccacctgctgtgcaacacacaggccttctgtccacgcccaccttacctgctgcttcccagaagaggaagcgggaagaggaaaaagactccagctcaaagtccaagaaaaagaaaatgatctctactacctcaaaggaaactaagaaggacacaaagctttactgtatctgtaaaacgccttatgatgaatctaagtgagtagatctttttgagctctagttttttgtcttgaaagtttagctattaaattggattttgaagaaaatgaatattttgggagtgatataaatgaaaatattaaatttaagagtaatgtttcatccatggtcttgcatgtgatattcttaccattgacgctagtaaagtaaaatttgctatttcacgtgtttgtgattgtcctttgttatattcttttctgtcaaaaacaagctttctgttgctcctttgctttctcttcttccctctgaattaactccaaatcagtgagtaattgatgtctggagaaggaggtgtattactgttgcccaaaatggagagcatcctttctgggatctgttcaaagccctgcgaatacatgaaatcctggaaaccagttgaacatgaatggtcagaggttttgaatttgagtggttcggtttcttaattgttttattttaagcagttgtttttttttgtattaaaatactgcaactcatatttttgtcaaagtttccactttcttatcagagacaaaagccagaaaaatacaaaaagtgttcctttcccccattcctcaagcataacgtccaacagtttggcagctggaagctgtttttgacagttgtgacttgtatttggtgatataaacaagattatagaggcactaaaccgtaaatgtagtttcatttttttggtcattactatcattttacaaaatatttaacttctactttgaacattaaaatgtagtccagctttttaaagccacagttaaccaccatactttttacaggaccaaaaagtctgattgtgctttaaaaactgatcatttagaatcaattaattagaattaggaatgcttaatgcctaccttaagtggatacctaattgattcctaaaataaaattgtggtccctttaatgatgttcaagttgcaacattgaagctgctttggtggtgctatctaaatgataatctgtttgcaaatgccaaatgaaaactctttgttggcagattgagctgtgtgctgaattaaacagaaatcaatttaggcatcttcacttttcattatcttatctcattggaaattatacataatgtaaacagtagaacgtgattcactgatttttttttactttagtttaatacaagtgtgcctcactttaagcaaaatatactaaatgatttctgaaacaggagtttccttactttttcagttaaaaagatttgtttacagaatttctttaaataacaaggcttctttggcctgtttagagtattcagatcacagaaattgatttcacacacaacttctttgaaatacctacattgcataaaatgaggcacacagatacatgtgcccattccatcgagattgcctcattattttgtgttattttatatttttcattttgtcattattaacactttagtataccaggttcattcactccctattttagttgagatgagttagtgtttctaaggagtgtttcgtaatctcttgtcccaaactaggctggtttgggaatccagtgagagtgactgaaaactgaaattcaagtcctgaacatccttccagaacacagcctatcaccctgtggagataacacacaaactatctcagaggacccccacctgtggcagtgaaaatcatgtgagagtcatagttcaaaagaaaaaagtgctgggcaccgtggctcatacctgtaatctcagcactttgggaggccgaagtgggaggatcacttgagcccaggtgtttgagaccagtctgggcaacatagagagaccccgtctgtacaaaaaattggccaggcgtggtggctaatgcctgtaatcccaacactttgggaggccgaggtggacggatcacctgaggtcaggagttcgagatcagcctggccaacatggcaaaaccctgtctctactaaaaatgcaaaaattagccagatgtggtggcacacacctgtaatcccagctactcgggaggccgagtcaggagaatcgcttgaacccgggagactgaggttgcagtgagccgagatcatgccactgtactccagcctgggagacagagcaaagctctgtcaaaaaaaaaaaagaaaagaaaaaaagccgggcctggtggcgcatgcctatagccccagctactcgggaggctgaggtgggaggatcacatgagcctgggaggtccaggctgcagggggccgtgatcctgcccctgctctgcagcctgggctatacagcgagacaaaagaaaaaaagaaaaaagttagtggtaacaggataaactacataaccatatattattccttcacattcatgaagcaggtcaatttgaagcttgaggacgacttccattcctctaggtgaatctgccaagaaatgccttggtagaactaagagtgccaatggtatcagcaaggccagtctggttccctgtgattcatggtaattctcactatgactttgacatggtgttcctacacagtgcctatcaacacttatagacacactgtgtaagcgtttgttacatttacttttccttttgtcattaggtcttttgttacagaggccactctgctctccacaatcacacatttacacagctcccccttgccaagcagtgtagaccctcacaggctttggataactatccttgcatcattctccacaccttgtccccggtgttgaactgaagcatctccttccacgttccctgcccgttagttagccaggccactgcccacattgtcacaaacattatattaacaggaaaactggcccgtgccatattccattatgagaggttatttttaattcgattaaattccaatgtttattcagaaaacctggtagagattgaattactctatgtactttcttagttttcttcttcatatcatattttgaccatttatcttctacacctggctgacctgcatgttccttgtagtgtaacttctacttggtgtttgcgctttgctttgttttcaaatttaaattgtgagatacattttcaaacctatctaagaaatagccctgatattgaaatggcttctgtggaataggtttgacagatgtaagtctttgattctttggctttggtttttgtgcctgttacagttttacacacattcattcagaggaagacattaccatcaatgtgttgtttcttttttcaaattccagtatgtttttaaagacccatatttcactaagcagtgtacttgttgaaactgatgtgagtgactttatgtttccacatgtgatagagcatcagatactggagtttgccaggagtagaatggttggattcagaaatgtttagctgactcattgcaggaagttacactgtaaaaaagtgaatcaaggcagggaagacagatttaagtaccatgcagctcaaaatgacaattacattgtcattttcattgtgaatacttttaggttctatattggctgtgatctttgtactaactggtatcatggagaatgtgttggcatcacagaaaaggaggctaagaaaatggatgtgtacatctgtaatgattgtaaacgggcacaagagggcagcagtgaggaattgtactgtatctgcagaacaccttatgatgagtcacagtgagttctgataagagcatcatatttaataatttaggaagccaaattgctctgactggttacttatttattttaaaataaaaagcagatttttttctacatttattatacacttacattacaaattccttttcatttttctctttttccctttttacctacccttcaaaatttatcttgcttcatagtgaatgtttgagacacattggggaaaatgtggtttaatggtagatttgattcttcaatatgtaacatagaaattaatgagattaaaatagcctgacttgtttggactttatcagtgtttgaaatggtgctttattgtaggttagaaaaacactaatttgggtacaagctctgagactctgttattagcttataggattttgaacacccatatggtacagtactagttgaaagatttttggctttgttttcagctttaaaatcaattgaatgtttcatatttatctttaaattggttctccagtattacacagtgttcttataaatttttttactgcttgttcttaacatcaaaaatactaaattaatgaactggaatgtcaatcttgaaagtattaaaaccataatactaaaactattttatatcccagggtttagcaaattttcaggtgcatgctttattataagtaacatcatcccatgtgttttgaactcacatttccatttcggatcttgcagattttatattggctgtgatcggtgtcagaattggtaccatgggcgctgcgttggcatcttgcaaagtgaggcagagctcattgatgagtatgtctgtccacagtgccagtcaacagaggatgccatgacagtgctcacgccactaacagagaaggattatgaggggttgaagagggtgctccgttccttacaggtgagacccctctgtgtgcagcatttcaaaatgaaatcagccagcataattttggaagcatttctaggatttcaagtttccaatcttagaatgattatttactgactcccagctagtctagtgaagtgcctaacaaactgcagtccttcacgtaccagtgccatgagctttaccatatccccacaccacgtcagcttatctcacactcacaagagtgttaacatgactcacttctttatacattttatttttaaggagacttcctctcacccccatggattgagaagcagtatgattagattatagttgttcttggccgggcatggtggctcatgcctgtaatcccagcactttgggaggccaaggtgggcggatcacaaggtcaggagatcagaccatcctggctaacacggtgaaaccccgtctctactaaaaatacaaaaaattagctgggcgtggtggcgggcgcctgtagtcctagctactccggaggttgaggcaggagaatggcatgaacccgggaggcagagcttgcagtgagccgagatggcgccactgcactccaacctgggcgagagtgtgagactccatcgcaaaaaaaaaaaaaaaaaaaaaagattatagttattcttttccttatgaaaaacaaaaaggggactgggcgtggtggctaacacctgtaatcccagcacttggggaggctgaggcgggtggatcacaaggtcaggagttcgagaccagactggccaaaaggatgaaaccccatctctctactaaaaatacaaaaaattagccaggtgcggtggggcgcaccagtaatcccaactactagggaggctgaggtaggagaatagcttgaacccgggaggcggaggttgcagtgagccaagatcgagccacggcactctagcccaggtgacagtgtgagactctgtctcagaaaaaaaagaaaaacgggatcgagatggtttgcaggattagcaagtgatagagatatattgaagacatagaaagccagtgtggttgctcacacctataatcccagcactgtgggaggccaaggcaggaggatcacttgagtcaatgagttagagaccaacctgggcagcaaagtgagaccccatctctacaaaaaaattttttaaaaatcagccaggtacggtggtgcacacctgtaatcccagctactaaggaggctgaggcaggagaatctcttgaacccgggaggcagaggttgcagtgagccaagatcgagccacggcactctagcccaggtgacagtgtgagactccatctcagaacaaaaagaataacaggatagggatggtttgcaggattatcaagtgatacagatgtactgaagacacagaaagccagtgtggttgctcacatctataatcccaacactttgggaggccagggcaggaggatcacttgagttgacgagttagagaccaacctgggcaacaaagtgagacccccacctctacaaaacattaaaaaaaaatgagctgcacatgttggcacgcacttgtaatcccagctacttgggaggctgaggtgagaggatcacttgagcacaggaggttacagtgagctatgatcacgccactcgacaccagcctgaatgacagagcgagaccctgtctcaaaaaagtggggggaaataaaaggatatagtgcactggattgaaactttctcctgtcgttatcataatcagaagaattgaagtaactaaaaagagaatcatagtctcaatgtgtgcttgaatgttatctaacatcacgtctctgctacctcatcattaaccagctgtggtaatgattccacactttgaacccatcccacctgttgacagaagcgattgcaatgccagcatcactcagtgacggctcatcatgtagggcccagaatactgattttgtgacttctaagcttgtgctccattcccaacacaaagtcttctgaccagcctttgagtaccattattgtagaggaagctcatcttaggtaactattactagagcagaaatcacttaatataaaatatttcatgtatcaaatttaaaactcacttttgggttcattgatgtagtaactcaaccaggaaacttaaatggaattagtgttttcactgacaataatgatgctgctttttcattataggcccataagatggcctggcctttccttgaaccagtagaccctaatgatgcaccagattattatggtgttattaaggaacctatgggtaagtacatgagttgaatatgaagtttttcagaagtctcagtggatgttttattatccataaaattaatatcttagaatatttttagcaaggctggtgggggtataaattggtatggtcactttggagggtaaattgttagtatctattaaagtttaattgtggccgggtgcggtggctcacgcctgtaatcccagcactttgggaggccgagacaggcggatcatgaggtcaggagatcgagactatcctggccaacatggtgaaaccccatctctactaaaaatacaaaaattagctgggcatggtggtgcatgcctgtattcccagctactcaggaggctgaggcaggagaatcgcttgaaccagggaggcggaggttgcagtgaacagagatcgcgccactgcactctaacctggcaagaaaatgagactgtctcaaaaaaataaataaataaataaaataaagtttaattgtgcatactttttttttctttttttaatgagacgatgtcttgctttgtcgccaggctggagtgtactagcgcgatctcacatcactacaacctccgcctcccaggttcaagcaattctcctgcctcagcctcccgagtagctgggactacaggcatgcaccaccatacccagctaatttttatattttttgtagagacagggtttcaccatgttggccaggatggtctcaatctcctgaccttgtgatccgctccccctcggcctccccaaagtgctgggattacaagtgtgagccaccatacccggccaattgtgcatattcttgaacccagcagtttcatttcttaggatttacatgtgcacaagtatgttcattgtggcagtgtttataattacaaaaacattggaaatggcggggtggctcacgctggaatcccagcacttccggaggccaaggtggatggatcacctgaggtcaggagttcgagaccagcctggccaacatggcgaaatacgtctctacaaaaatagaaaaattagccagttgtggtggcaggcatttgtaatcccagctgctaaggaggctgaggcacaagaatcacttgaacccgggaggcagaggttgcagtgagctgagatcacgccactgcattccagcctggacgacagagcgagactctgtcaaaaaaaaaaaaaagattggaaatgaaataagtagccatcaatagaggagtagctatatcagatggtgtctgagtggagtattatgcagctttataaaagaatgaatgaaattaatgaatgggttggggtctctttgatcctctcatccttctccatttacttcttctttttctgaaggagagtaaattttatgaactagagagaataccctcatttcccagaaaaaaaaatggtaataggagccacgagtaatcgtatcaacacgaatggctacaaatgattttactaaaaaataatttatctgcaaaagaaattagaaaaattaaaacatagctaaaaccttccaaaggatcacttaccactaatgaaagaattatgttccaaaagccagctaagcattttttttaatgagaagagtttgtgtttcatggcagcatgaaagagggggaaacatgaagtggaaataaatgaaaactatctctgaaaaataaacgtaatgaagtagttattatctctgttctcctgatgttgaaaatagaaggagttaatcattgtacatatttcaaatttgggtagtcgcctttgagaaagtacctgggatgtttactaaaataataagttaattatgctggtaatagaagtaataatacaagttaatggtagaaaattcataaaataaggtcaggtgcggtggctcacgcctgtaataccagcactttgggaggctgaggtgggtggatcacgaggtcaggagatcgagaccatcctggctaacacggtgaaaccccgtgttagcccgtctctactaaaaatacaaaaaattagccgggtgtggtggcgggcacctgtagtcccagctactcaggaggctgaggcaggagaatgacgtgaacccgggaggtggagcttgcagtgagccaagattgtgccactgcgctctagcctggctgacagagcgagacacgtctcaaaaaaaaaaaagaaagaaaatttagaaaataaatactatacaaaattagcccggcgtggtggcacatgcctataatcctagctgctcgggaggctgaggcggagaattgcttgaacctggaaggcagaggttgcattgagccgagatcgcgccattgcactccagcctgggtaacaaaagcgaaactccatctcaaaaaaataaaaaataaacaaaataaataaagaagataggccaggcacagtggctcatgcctgtaaccccagcactttcacaggccgagacaagcagatggcttgagcccaggagttcaagaccagcctggacaacatggcaaaaccctgtctctccaaaaaaaatttttttgaatcagccaaggccaggcgcagtggctcatgcctataatcccagcactttgggaggctgaggcaggcagattgcttgagatcaggagttcaagaccagcctggccaacatggtgaaacctcatctctactacaaaaaaaaaatacaaaaattagctgggtgtggtggcgggtgcctgtacccagctactaaggaggctgaggcacaaaaatcagttgaacctgagaggcagaggttgctgtgagacaagatcgcgccactgcactccagcctgggcaacagagaaaaactctgtctccaaaaaaaaaaaaaaaaaaaaaaagagatagccattgcttttggtgtgttcttgtatgcatgggtgttaaaattcatatcatacagtgaatacattttcctatgtaaatcttcttcgaaaacccatgattttaatgggtttttatggtccattagttgaatataccttagcttatttaaccaaaattattttcttgaagacctggttttcctgtttgtttttgttttttttaataccaagataagccccaaatggtggttcccccagcactttggccaaggcaggtggatagcttgagcccaggattttaataccagcctgggcaacatagtgagatcctgtctttacaaaaaaacaaaaaatgctcaggaggctgaggcaggagaatcgcttgaacccaggaggcagaggttgtggtaagccaagatcgcaccattgcactccagcctgtggaacaagagtgaaactccgtgtcaaataaataaataaaaacaaaaaatggctgggcgcagtggctcatgcctgtaatcatagcactttgggaggccgaggcaggcagatcacctgaggttgggagttcaagaccagcctgaccaacatggcgaaaccctgtctctactaaaaatacaaaagtagccaggcgtggtggcacatgcctgtaatcccagctacttaggaggctgagacaggagaattgcttgaacctgggaggtggaggttgcggtgagctgagatcacgccattgcactcctccagcctgggcagcaagagtgaaactccatctcaaaaaaaaaaaaaaatttagccaggcatggtgcctcatgcctgtggtcccagcccgagagactgaggcaggacgatcacttcagctgggaggtggaggctgcagcgagccataatcgcactactgtactcgagcctaggcaacaagcgagaccttgtcccacaaacgtaataataaaatacatatatacatacatactaagttaaacataatctcctatatctcctaagtaggtacataaagataataatatagatctctaaaacgtattgttgggaaaagaagtgaaagttacagagcagtacccagattttaagcagtaaacatttattttctaagagtacctaaatgtgtttagaaatgcatagaaaatgtctggaacaatatagactaaattgaaaatagtaattttctttgaggatataagggaaccaacaaaatcagcaacttttatattcttaaatagaaataggtttaaatgaattatgtttgctaatgtattttgtaaacttaatactttttcacatcagctgttatagacctacatcattttaaattatatgaaattaaaattaacagcccccatcaatagatttttttattgtgtgtagtttttgctagtataaacaacatgccactggacatctttgtttatacatctgcctgtacttgtttgttctaagaaaacagtctccaggtgaaagggtctaagtacattttaggctttgctgttgttgttctgcccaggctggagtgcagtggcgccatcaccagctgactgcatcctcgtcctcccaggtacagctgattctcccacctcagccttctgagtagcggggatgtagtatactttttttgtttgtttgttttttgagatggaccgcccaggctggagtgcagtggcgctatctcggctcactgcaacctcagcctcccgggttcaagcaattctcctgcctcagccttctgagtatctgggattacaggcatgcgccaccacacccagctaatttttgtatttttggtagaatcagggtttcaccatgttggccaggctgatctcgaactcctgacctcaagggatccacctgccttgccctcccaaagtgctgggattataggcgtgagccaccgcacctggcccattttaggcttttttttaaaaacaatgtccaggccaggcaaggtggctcatcactgtgacacctccacacttcagcatgggctacaaagtgagacgctgtctttaaaaaaaaaaaaaaagagttatttttaaattacactttagggccgggcacggtggctcatgcctgtaatcccagccctttgggaggctgaggcaggcggatcatgagttcaagagttcaagaccagcctggccaacatggcgaaaccccgtctctactaaaaataccaaaattagtcgggcatggtggtgtgtgcctgtaatcccagctactcaggaagctgagtcaggagaattgcttgaacccaagaggcagaggttgcagtgagccaagatcgttgcgttgcagtgatctgagatcatgccactgcacttcagcctgggcaatagagtgagactccatctcaaaaaaaaaaaaaaaaagagaagaaaaaaattacacgttagcaaattgaaccagcttccactaatagtgtatatctatggcattctgtctgcgctattggaaaacactgagtattatcactcttttgaggggtatattttttgtctttgagaatatttatttcaaaagtagtgtgttttatggtgtacaaatgcagatgttacagagatgtaaaatgtaatatttaccactactcctatagtgtcccctatagttaacctctgttaataggccagtgttaccatttttaatttctgctaatttggcaaagaaagtgtttttatgtaagagtttcctattcacatatttcttatatttttctctcgagatatttggattgttatcagtattatttaagggcttttattttattattttattttttttgagaaggaatctcactctgtcacccaggctggagtgcagtgtcgtgatcttgaatcactgcaacctctgccacccgggttcaaccgattcttccacctcagcctcccaagtagctgggattacaggcgcccaccaccatacctacccagctaatttctgtatttttagtagagacggggtttcaccatgttggttgaccaggctggtctcgaactcttgacctcaggtaatccgtccgcctctgccttccaaagtgctgggattacagatgtgagccactgcgtctggctatttaagggctatttatatactaaagacaagtaaaagtttcatagattttttggcatatggtagtttttaacattttttggagtcatatctattaatcattataaactcagcctttggtgtcatgcttggagtctttttcctcctccataatatatactcacctatgtgttctcctagtaccttaagggatacctaattaacttggaaccatacaatgtccaagcattattcacatactttattaaaatgaaaattagtcaagcagtaagtaaccagaacataatataagtatgaaccaagaatgtcctagtgtgatgtgtgcgttctttcctgaacaccttacatgaacctacagcatcgatgtgccaagtcttggaatccaactctgtgtgttttcacagttcttcacatttacacattttttttctttaactgcataaactggagctttcaaagagtagtgtgtctgtgtgtgtactaaaatatatatatttatatatatatatattttatatatatataaatatatatataatatatatatataaggccaggcacggtggctcacgcctgtaatcccagcactttgggaggccgaggcaggaggatcacgaggtcaggagattgagaccatcctggctaacacggtgaaaccccgtctctactaaaaatacaaaaaattagcaaggcatggtggcagatgcctgtagtcctagctactccagaggctgaggcaggagaatggcctgaacccgggaggtggagcttgcagtgagctaagatcccgccactgcactccagcctgggcgacagagcgagactgtctcaagaaaaaaaaataaaatatatatataacaaaatttgccattttaatcattttaataaacccacaattatcttggcatataatgagagagaatttttttttccagatttgtaggcagttgccccaaaccctttttttgtttttgttttttgagacattgtctggctctgttgcacaagcagtggtgagtgcagtggtgcgatcttggctcactgcagcctccacctcctgggttcaagggattctcccctcagcctccctagtagctgggattaaaggcatgtgccaccatgcctggcttatttttgcatttttagtagagacagggtttcgctgtgttggccagggtggtctcggaactcatgaccttggatgatacgcccacctcggcctcccaaactgctaggattacagacgtgagccaccccagccgcaacctcatttatgaatgaactcctttccctactgacttgaagggacacccttaatatatgtgaaattcttatactagatacagttaaatctgttcctgttttgaacttgtctgcgttagtgtttgtgttgttctgcatgctgccacacttttcattaccacagctttagaatattttttaatgtctgacagataagattatctcattacttttcagatatttcttaggtattctagtacttttatttattggttgaacttccaaatcactttcaaattctaaaatattcactaacctttagtttgaaatgtgttgtctgtctaccctagattgattggagattactggcctttcactctctcagatatttatgtcaaattgtatacagaattttatttcaaacacgtcgttctcctaggatcaatgttgtttcagatagatttatttcagtcagtacattccaaagcagttgcctgctctacagcaaaaaaaaaaacaaacttgttttcctgtgctctcacgctacggtcaacgtgggagaattctgtttggcggcctctggtcagcaagaagtgggtggggatttctccccatgaacaaccaatccagcctcagaccccacctgagtgtcttctaattcaattcaattcaattctgacactatctacctgaagatagggttagatcccacaggttgggtactcagtccccaagattaccccctcttcagatgccggtcgccagccccaggtggttttacctgcacgtctgaccatctggctataaatcagggttcccacaaacctctcctaaggttcagtaatttgcaggagcagctcacagaactcagggaaacacctacttaggcttaccggtttctcaaggacactgcaaaggattccgatgaacaccaggtggagaagatgcacggggcaatgctgtggggaggggtgtggagtctcccatgccctctctgggcacaccacctgacagttgcctccacatgttcagctgtatcaggaagctctccgaacccggtccttctgggtttttaggaaagcttcattacgtaggcatgagtgattacatcattggccattggtgatcagcttaaccttcagcccctctccccttccggaggttgggggatgggactaaaagtcccaaccctccaatcctgactaggtctttccggtgaccagccccaatcctgaagctatctagggaattccaaccaccagtcattaacatataaaagaaactcttatcactccggagattccaaccgtgttaggagctaagtgtcaggaaatggggacaaaaaccaaatatatatttcacaatatcacacccatctatcaccataatgattttctcctttctgcatattgcctgtactattacatactaatattcgtatcagctgatatttttcccttacatttaagtggacacttatcaatccagtcatgaatggtaagacagtatcactttgtcacaaataaaaggtaacaataaaaataaagcaaaatgatgttattaaagtctaataccaggatcataaagccactagtacagagattttgttcttaattctggattcccatctttgtacatacactaaatggtttgcatgtaaaaatgcattatacttagatatgcatagagcatgtcggtgtgtttccttgatttcaaaccatttgaatgaagaacggttctgtgcagttacctgaaagtaaaagaaccttaacagcaacccggatttatattttagaacctcaatcagaaacaaaattggaaaagtactcttttgttctttatgaattgcaaaataacctccagggtgaaccagcctggctccaggactgcttgcacagtaaacatatatacttgttagaacttcggagaatattcacattggaaaaaccttaaagctctgaaaatgttttacattttgtgtttttaagaccttgccaccatggaagaaagagtacaaagacgatattatgaaaagctgacggaatttgtggcagatatgaccaaaatttttgataactgtcgttactacaatccaagtgactccccattttaccagtgtgcagaagttctcgaatcattctttgtacagaaattgaaaggcttcaaagctagcaggtgagcagatgggttcggtattctgaattaattcaactcttcacactctttatactattctgtctaacgattcaaccagtgcagtttatggtaaatttaaccttaaatatctttaaaaaaaaaataaataaatcaagactccagggttatgatctactgccaaggagaagtggacaaattgctgggtttgttgttgatctacttaaagtctttttttgaaaattcaagaagtggccgggcatagtggctcacgcctgtaatcccaacactttgggaggccaaggcaggcagatcacctgaggtcaggagttcgagcccagactggccaacatggggaaaccccgtctctaccaaaaatacaaaaattagccaggtgtggtgacgcacgcatgtaatctcagctacttgggaggccgaggcacaagaatcacttgaacttgggaggcggaggttgcagtgagccaagatcacaccactgcattccagcctgggtgacaatgagactctcacaggaggtggggggaacatcccagccttgtcaacataatgagaccatgtctctacaaaaatttaaaaaattaaccaggcatagtggcatgcacctgtagtcctagctactcaggaggctgtgacaggacgatcacttgtgcccaggagttcaaggctgccgtgagctgtgattacaccactgctctccaacctgagtgacagagtgagaccctgtctcaaaaaaaaaaaaaaaaaaaaaaaaaaaaaataagaataaaagaagaatttcctgagctgatgattgtcacaggactttaaattctagcagaataaattccttcactcagcaaataacttttgagaacctgatgtgtgcctgatactgggaatttagcagtgaataaattaaagcccctgcactctatgaggggtgggtggagcaagggggacagttgataaacatcataaaccaggtagacaaatggaaaaagactcacccctacatacatcgctataaaatttccaaatgctaagaataaaagaaactcttagataaaaccgacaatctataaaacaagaattagattggtgtcagatttttctgctgtgacatttagtgctagaagattatggaagaataaatctaaaagtttaagaaaaaatgattgtcagcctagaagtctgtgcagccagtcaagtttagaggcagaataaatatattttcagtcatgtgaggactcagggcatcctttcttggcaggtatttttaaaaagtgtgtgctattggccaggcatggtggctcacgcctgtaatcccagcactttgggaggccaaggtgggtggatcacttgaggtcagcagttcaagaccatccagaccaacatggcaaaaccccatctctccttaaaatacaaaaattaggcaggcataatggtgcacgcctgtagtctcagctacacaggaggctgaggcatgagaatcgcttgaacccgggaggcacaggctgcagtgagctgagattgcgccactgcattccagccttggtgtcagagtgagactccatctcagaagaaaaaaaaaaagtgtgctgtcaaaaataaggaaacaaattttttccttttaataatgtatcttcctgtaatcccagcactttgggaggccgaggcgggcggatcacgaggtcaggagatggagaccatcctggctaacacggtgaaaccccgtctctactaaaaatacaaaaaaattagctgggcgtggtggcacatgcctgtaatcccagctactagggaggctgaggcaagagaatcacttgaatctgggaggcggagcttgctgtgagccgagaaggcgccactgcactccagcttgggcgacagagggagattccatctcaaaaaaaaaaagtatcttttttttttttgagacggagtttcactcttgttgcccaggctggagtgcaatggcgcgatctcggctcaccacaagccccacctcccggattcaagtggttctcttgcctcagcctccctagtagctgggattacaggcatgtgccaccacgcccggctaattttgtatttttagtagagacctggtttctccatgttggtgaggctggtctcaaactcccgacctcaggtgttctgcccacctcggcctcccaaagtgctgggattacgggcgtgagccaccgcacccggccatgatgtatctttttatttagggacagggtcttgctatgacccaagctaatcttgaactcctgagctcaagcgatcctcccaccagccttggcctcccaaagtgctggggctgtgaaccactgtgctgggccagaaatatatatatatatatatattttttttgagacagagtctcactctgttgcccaggctggagttcagtggcacaatctcggctcgctgcaacatctgcctcctgggttcaagcaattctgctgcctcagcctcccaagtagctgggattacaggcagccaccaccatgcccagctgatttttgtatttttagtagagacggggtttcaccatgttgaccaagccggtctcaaactgcagacctcgtgatccgcctgcctcagcctcccaaagtgctgggattacagatgtgagccaccgtgcccggccagaaatttttgtttatttgagttcagaaaacaagtggttcaggaaagcaatgagaattactctgacccaagatgacatttatacagcaggctgtaaaatgtcagcagaccaaatcctagcaggagaatggagcactccccagaggctcagtagagcaagaaaatgactcatacattagataatttgtttaagacagaaaaacataaggctatgattaagccaaagaacgtcagggataaaaatgaaaggcaattagaaacgccactaaaaacagaaagttgtgtaagtgtaccctgttagctgggcacggtggctcatgcctgtaatcccaacacattgagaggctgaggcaagaggatgcttgagcccaggaattctagaccagcctgggcaacatgaggaaaccccatctttacaaaacacaaaaattagccaggcatggtgatgtacacctgtggtcccagctgcttcagaggctgaggtgggaggattgagcccatgaggtagacgctgcagtgagccatcttcatgccactgcactccagcctggaagacacaacaagaccctgtctcaaaaaaaaaaaaaaaaaaaaaggccctgttagcaaaggactaggtgctacagagaaaaatatttacattttcgtagtaacgtaaataatgacattgggccgggcacggtggtttacatctgtaataccaacactttggaaggccaaggcacgtggatcatctgagatcaggagtcgagaccagcctggccaacatgatgaaaccctgtctctactaaaagtacaaaaattagccaggtgtggttgcacatgcctgtaatcccagctactcaggaggctgagacagaatcacttgaacctgggagacggaggttgcagtgcaccaagaccgcgccactgcactccagcctgggccacaagagcaaaactccgtctcaaagataataaaaataatgacattggttttcgacttttagaatcaccctatagacaaagcatagaatgatataatttttaaattatagggaaataaaacttggactcaaaaaagggaggttgggaaatggttaagtgagcttggttctccttgccatagcagggcttaaacaaaagttgataaaacaagaaatagcagtataagaaattaccctggccgggcgcagtggctcatgcctgtaatcccagccctttggaaggccgaggcgggcggatcacctaaggtcaggagttcaagaccagcctggccaacatcgtgaaaccccgtctacactaaaataaaaaaattagctaggtgtggtggtgcacgcttataagtctcagctacttgggaggctgagacaggagaatcacttgaaccttggaggcggaggttgcagatcgcaccactacactctagcctgggcaacaagagtgagactccgtctgaaaacaaacaaacaaaaaaaaacctacccaggccgggtgtggtggcttatgcctgtaatcctaacactgtgggaggctgaggtgggtgaatcacttgaggtcaggggttcaagaccagcctggccaacatggtaaaacctcgtctctactaaaaatacaaaaattagctgggcctgggggcaggcacctgtaatcccagctactggggaggctgaggcaggagaatcatttgaacctgggaggaggaggttgcagtgagctgagatcctgccactgcactccagcctgggcaacactgaggctccatctcaaaaagaaaaatacatctacccagagaactgaaaagtcaaagggattgatcatagggagcctggatttcagatggagttaaggtaggacagaggagcacaacttctcattataagcccctctatgctttttcatttgtacatcgtggttattcctctggttcagtttctaaaattgcttttttaaattgggaaggcctttggtggtaactgtgaggtagaagccaaggagtgtgaatcctaccctgctgccagcttgctggcagagcccacaggatgactgctggcaactgctgatgaaggagaggaaattgcctggaggtcctggggactgtaggcaagacaaagggaattggtaaaggagagatggaggcctaggctgggcctgcacagtgaaggggccacttaggatgtcttcttgccacgtggttattttatgtagtttttaaatatactcaagttgacataattttcattaaagcacatgggagctgaattgagaagtttgctcaattctgcttaaataaacaaattaggctgtgtgcaatggtgcatgcctgtgataccaacactttgagaagccaaagcaggcagttcgcttgagcccaggagtttgagaccagcctgggcaacatggggaaaccccatccctacagaaaatacaaaaaattagccgggcatggtggcatgtgcctgtagtcccagctacccaggaggctgaggtaggaggatcacctgagccctggaggttgaggctgcagtgagctgtgattgcgccactgcactccagactgtgctacagagtgagaccttgtttcaaaacaaaacaaaacaaaacaaaattacaatgtaaagagttgtataagggcaacttgctgttgcctttttagggaatttctattgttttccagatttaaggcagaatgaaacataactagccagttattgaaaattgatttatttatggattttcagaatttcctttgccatattttcccattttatgatctccagcattgtttgcacattgttttcattactgcactttgttataattcatcatttataccatccatattctttcttttcttacagattgtgatatctttagtctgaatttttaactggaatcagaactggatgttggggtcactctttgttttattgtacctcgtgattacctaattcaaaattgccccccaaaaagtcagattagttaatataattttttaatgttaaagatgtatcgtggtaaaaaatttactctagcagccatgttgaacaatgtatttaaaaattgtaaactcttggaatactgtatttatctgctatttcaatataaagtcctttgacttagtcctggtaactgtacagtaatttggtttactaatgaaagttgtgaataaaactgtgaaactagaagggagactttctggactttaatagaaaaatgtgattttaagattgctttttcttttgttttagcgtaatttttccctttatattcccctcatcaatgtaaataaacacacacacacacacacacacacacacacacacacacctttcaccacaatggtaatgcttctgtaaatgcctctatttgtccagttggctgaaaatgttgtaatctttattagacaaatatatatatatatatatatatatatatatatatatatatttaaatattggctttttccagtgagctattatgtttagtgtacagtgaaaagttttaatattataggttaaaattttcttaatcgttcttttctattcgcttgccaagggtgaatgaaagaacatggctgcttctcccagactgactgaccttggcatccgcataaagcatcattgttttcaaaaatgaagggtgcttaattgttcccttttttctatattctgtaggtctcataacaacaaactgcagtctacagcttcttaaagttcagcgtgttaacctaacataaaacacagcaagaatctggttgtctgaactattttaaattaaggagccagatgtttttagtcaggctatcctgacaagacttgacctaaacttcgtttttattggtcataacagtccaattatattcttggccaattttgtccaacggacaagaaaaaagcaaagtcaacgacaccattatcttgtcaagatcagatggttttactattgtggcagaagcgagaaaactttgtttattgaaaaaaaaagaaaaagaaagcaagaaaaaaagatactatggggtcaagtgtaactccatggaaatgccacgtctgctcttcagtgaagaagctggtttagagtctcacagaaaacttttgactgtatttatttattgttgcaaaaaagacgcttttttattgctgccctcatttgtcagctaattattttttcttataaaatccagccccggttacatataatcatctgtatcttatcatgattcctgtaggtaaaagtacaagacgacctctagatgtcttttctttctatgaaaggagctgctatgtacacatgtgcacacacacacaactgggaatcaacaatgagtttattgttcatggtagattaaaattaagcttgcataaaggttgggctaagtggtcctggactacagactctgttgccttgaatataacagtacaatttgtcaattactctgcaccaggctaaaatgagtaaaatctatttgaaggtatcttgtttgtaaacatttgtcagattctaatttttttcttttgtattaaaattcaactatggatgtatatgaaacaaaataaatggagataatttttctcccacagacagaggtgtctttgaatgtgcgctaatgattatctgtaagcctttgtggggagggaggcctgcaaggtcatgaaaggcagaagagtctaattgtgcctggatttctccaggacagcagtggcccctcgttttatcattcccagtccattgtcatcacgtcagagaaaaatcttcaggggtgctaatcctgttgcatcagttgatcatactaacgagaacggtaatgcgacaagatacacattgccttcatctgtacattctgtgataccaggcaaattaccaattacacacagctacttatattttatgaagggcattttttagatgacctcatcctctgtgttatttgttgattgggtttgttttctgtttgttggtttgtttgtttcttccacgtaaggaaaagtagtgtaaacagtagcgagaaaatggaaaccacagaggaagatgtattttgcatgtttttcctttcagtgttcttacacgttgtatcactgcattgtggtaatagcttctataaaatctgccatagttggattatgcagctttgcaaaaatttttactagattttgcactaactcatattagctttgtcctaccaacttctggaatttatctaattattgtttttcaaagtttctttccttttaatgtttccctgctatgcaaaacctttcccagacctcagtttcttaaaagaaagatgttgctacagttcccgattctttcttattacaggctcaggtgtacaggttattctgggttaattttatctaatgaagcccattcctttttgtacataaagatgtcacttaaacttatgcttacaaactaaagactaatcgctcaatatgaaaacatgaaaaaatttttgcttaaagtattaagatggaagtagttaaatatgggttattttgtccttttacttttttaaaaaatgttacatattgtatgcactgtgctgatgcaagaattctacattttaatgagttataaaattattctgcatctcatcacgtcacagtatttctgtactatttattcatatatataaatatatatgggcttaatcatttaaaatttgttgcagcaagaactttcctacctgtaggcaatagattgctatgtttttaacaaattgtggcaaattctaaacagcaattcttttgtacgtaataggacatttcatcctagaaaaataaagtaatgtttttgacattggatttggtgcagtttctaatgaagcaatggttggttggttaatatgttttctatagctgttagccttgccaaattgtacaaaaaggataaattttatggaaatctgaaaccaggaagatgttaatttcatatgtgtatttaacggtataaagtgttgtatagtttctatcaccatacaaatacatagacattttatagtttcatcaactacagagctttagtccttcagaagtaatttttgaaaaacatacttctttttttttttttttgagatggagtttcactgttgttgcccagtctggagtgcaatgatgccatctcggctcaccacaacctctgcctcccgggttcaagcaattctcctgcctcagcctcccaagtaactgggattacaggcatgcgccaccacgcctggctaattttgtatttttagtagagacagggtttctccatgttggtcaggctggtctcgaactcccgatcccaggtgatccgcctgcctcggcctcccaaagtgctgggattatagacatgagccaccacgcctggcctgaaaaccatacattcttatagaacataatgaattccaaaagctgcttttctgtgacaagcagaaatctttgacaagcttctgctattcagaaagatctacataatacagctattttgcttccaataattcaggcagtaaactgtacatttgtgatattcttaggatgtttctaccccaggccttgggcttataaatacatttaatttgcatcaatagatttccttggctaaaagtattttcagtacctgttatactttacctgccaagttcacaatccttgaaaccatttcatgaaaagtattttcctattggtaaagcttttattctcctatccaaattctgcaggaggtttaaataaaattgtggctgggcatggtggctcacgcctataatcccagcactttgggagactgaagcaagtgggtcacttgaggtcaggagttggagagacctgcctggccaacatggtgaaaccctgtctctactaaaaatacaacaatttagctggacaagaggcacacgccggtagttccagctactcaggaggctgaggtgggaggacagcttgaacccgggaggcagaggttgcagtgagctgagattgtgccactacgctccagcctgggtgacagagcgagactccgtctcaaaaaaagtgagcttttggagatattttctgaaggaaaataattacctttttatatttcaaatggcctagagtgttatttagagacactaagatttgctgttgtttgtaatctaccttcctaggatctgcaaataaaagttacttccctatttctgttaattcctttaggcaaactctctgctgctttatgttaaagagccaacctggtggcctttcagatctctgcacacttagacaaagctacatggttattacagctttcgctcttcatgattgaagctattaccgtaggtctcagacttcttgtccttaatgtgagaatggtgatatttcatggataaagtaatgaagtacttgaggaggtgggggtaagaaccagctgagaagtatttttaataatttgaaacattctgaggtacttctggatacttggagcgagatactagaagattttctcagaagatcataccgcttgatccaatttgaaccaaattcaactaaagaaattagctatattttcaactaaaattagctatatttttaaaatgttaatgtcctgctttatctaatttatttattgcttgctcaaatatttcctgaaattgaggtgatgcattataggtggcaggtcagtttttatgagtttgtttctatgtgtgaatggtcagccttaaaaatgattttatccgggcgcggtggcttatgcctgtgatcccagcactttgggaggccgaggcgggcggatcacctgaggtcaggagtccgagaccagcctggccaacatggtgaaaacccgtctctactaaaaatacaaaaattagcaggctgtggtggcacatgcctgtaatcccactactcgggaggctgaggcaggaaaattgcttgagcccgggaggcggaggttgcagtgagccaagatggtgccaccgcactccagcctggccgatagagcgagattctgtctaaaaaaaaaaaaaaaattcaagagaaatactaacagtgccaaatgatgctttctttacaaggcagttgtgaagagctatgggtcgggcgtggtggctcacgcctgtaatcccagcactttgagaggccaaggcaggtggctcacaaggtcgggagttcgagaccagcctggccaatgtggcaaaaccctgtgtctactaaaaatacaaaaagtagccgggcctggtggtgggtgcctgtaatcccagctacttgggaggctgaggcaggagaatcgcttaaacccaggaggtggaggttgcagggagccaagattgtgccactgcactccagcctgggtgacaagagcaagactcagtctcacataaataaataaacaaacaaacagtgtatgtgttttatagacgttttcctacccaaagaaaaacaagtgcttggctgggcgcggtggctcacacctgtaatcccagcacttcgggaggctgaggcgggcggattgtgaggtcaggagattgagaccatcctggctaacacggtgaaaccccgtctctactaagcatacaaaaaaaattagccgggcgtgatggcgggcgcctgtagtcccagctactcgggaggctgaggcaggagaatggcgtgaacccgggaggcggagcttgcagtgagctgagattgtgccactgcactccgcagtgcgagactccgtctcaaaaaaaaaaaagaaaagaaaaaaaagaaaaacaagtacttttttcccttgaattgtaaaataatagcttcatttgaaggagggatgctattgaattactactgaaggcaagagagtattccatttagggactattaatgtgtgcacataggcacaaacccatttgctaagaaaaatctatcaatgggacaagattataagaaactatagtgcatttgctcattaaaattttccatcaaattggcagggcgcagtggctaatgcctgtaatcccagcactttgggaggctgaagtgagtgattcacttggggccacaagctcaagaccaacctgggcaacacggccaaaccccgtctctactaaaagtacaaaaggccaggcatggtggctctcaactgtaatcctaacactttgggaggccgaggcaggtgaatcacttgagatcaggagttctagaccagcctggccaacatggtgaaaccccatctctactaaaaatacaaaaattaaccgggcgtggtgatgggcgcctgtaatcccatctactcggtaggctgaggcaggagaatcgcttgaacccgcgaggcagaggttgcagtgagccgggatcacgccactgcactccagcctgggtgacagagtgagatgccatctcaaaaaaaggacaaaagttagccgggcattgaggccgggcgcggtggctcacgcatgtaatcccaacactttgggaggccgaggtgggcggatcacgaggtcaggagatcgagaccatcttggctaacacagtgaaaccccgtctctactaaaaatacaaaaaaattggccaggcgtggtcacccaggctggagcgcagtggcgagatcttggctcactgcaagttgcaagctccgcctcccaggttcatgacattctcctgcctcagcctcccgagtagctgggactacaggcgcccgccaccacgccaggctaattttttgtgtttttagtagagacggggtttcaccatgttggccaggatggtctcgatctcctgacctagtgatctgcccgcctcggcctcccaaagtgctgggattacaggcgtgagccactgcgcccgacacagacctggttttgaatgaagaccttaatgtttagccaggaagtttctaagaatctggcctgcatgtgtttgccaaggtgtgcatgttaactatgtgacctccaagtatcacaggtatcacagctctggcactttttttgtttccagaattacccagaaacggactattatcaaaccaatctaagtcaaaccctaaacttaagcttcaggattatgtaaaagttatttttttcctttttctttattattattattttttttttttggaaactgggtcttgctctgttgcccaggctggagtgcagtggcacagctcacagcagccttgacctcctgggcacaagccatcctcctacttcagcctcccaagtagctgggaccaaaggcacacgctagcacgcctggctaatttttttattatttgtagcgatgaggtcttgctatgttgcccagtctggactcaaacttctggcctcaagtgatcctgcctcggcctcccaaagtgctgggattacaggcatgagccattacacctggaccttttttaaactagagttatttcagcaggatacagactaaaattaaaaaatcagcccagcgcagtggttcacgcctgtgattccaacacacgcaggccgagggggttggatcacttgaggtcagtagttcaagaccagcctggccaccatggtgaaatgctgtctctactaaaaatacaaaagttagccaggcatggtgctgggcacctgtaatccccagctactaaggagtctgaggcagaagaatctcttaaacctgggaggtgaaggttgcagtgagctgagatcacacaccactgcacttcagcctgggtgacagagcaagactccgtctcgaaaaaatattccagaactatttataacttttctctttgttttaacatctgagcatccaaccaataacttatctatttggtcatcttttttttttttttttttttttttgagacggagtctcgctctgtcgcccaggctggagtgcagtggcgcgatctcggctcactgcaagctccgcctcccgggttcacgccattctcctgcctcagcctcccgagtagctgggactacaggcgcccgctaccacgcccggctaattttttgtatttttagtagagacggggtttcaccgtgttagccaggatggtctcgatctcctgacctcgtgatccgcccgcctcggcctcccaaagtgctgggattacaggcgtgagccaccgcgcccggccctatttggtcatcttgtagttgtctccaccacattattcgagataaccacttagcctttgtttgtttgtttgtttttgagatgaagtcttgctctgtttcccaggctggagtgcaatggcacaatcgcgactcactgctacctctgcctcccggattcaagcgatgctcctgcctcagcctcccgaggagctgggattacaggcatccgccaccatgcccagctaatttttctatttttagtagagatgtggtttcaccatgttgtccaggctggtctcgaactcctgaccttgagatccacccacctcggtctcccaaagtgctgggattacaggagtgagccaccgcgcctggcctagcctttagacatttaaaaattcaactttgatttgactggcctgagttatgcccgagttagttttttatcttaaagaaaactaactcaggaagtcttcattagctatgtactctatcaccaatagttcatgtaataatgctgctgactcccaaaaagcgattctagtaaaatttataagtttggacaaaactcatttttgaaaaatacttgaaaaatccctcagtagtgctttaccatggaacactcagaacctctcaaccctttattacctgtatgccccataattggaacaaataatagtatcagatattgtaatgttgggctattgcttcttggctcctgtgattccctagcgtcccatcctggatgtcctttaggtgcacagtgctactactgtgtgccatggacagtgtcaggacacattctgagcttcctgagtgcatcactgtgaggccaaataggctgttctctctccagtgaagattcctttctgtctttaggcagtcatcttcatctatgcattagtggtgtctctgttcaccatgcttcatataaactaaagtacagcctgatcttccgaaaaaatactcttttgtggactcaagtataaaatcaatatttaatttagctagtgattaaaccatttttttgttgttgttgtttgttttttgagatggagtttcgcttctgttgcccaggctggcatgcagtggtgtgatctcggctcactgcaacctccacctcccgggttcaagcgattctcctgtctcagcctcccaagtagctgggactacaggcacccaccaccacgcccggctaattttgtatttttagtagatacgggggtttctccatgttggtcaggctggtctcgaactcccaccctcaggtgatccgctggcctcggcctcccaaagtgctgggattaccagcatgagccaccacacccggccaattaaacctttttaaaaccaactgaaaaatgtttaaaattcgcttgcttgtgagccgtcattggtgaatattggttccaaggtttggggaatgaatttgagaaagcctttttctcaaacctttagggctcagtaaggctaaaacaaaaacaaacaggtgcatccaagatctgatttcaagtcaagatttattgctttacaaacaaacattatacttggtcttaatagaaaaatgacaccagatacatccaaaatacatttcacattgggatagctgccagttcagcacaaaacatacattactaggagcagggaggcatgaaaataaactatatcttactttttggtacgtcaggaacacttttgcctgaagtaagccctttagtactattttttattttatttatttttttaatccacccatctgcacactggccctttagtactctttaagtataaaactttaatacttgtcctgggctttgacccttgtgtttgatctaaatgacatttcaaacataaatgtcttttgactagtgcgcttactgttatgtacagaatttaaaatgtgatcgtttgaatataaaatctggtttgatacatgatataaaagttgtatatttaaattcaagaaaatgtttttgtggactatttctactaaagaatattaaattaaaataatttaaaaacttatgaagcaatgatctgttaactggacaggtcaattatctgagctgtgtaaatcattgtctggcactacagttgaatcaccttgacactgagctcaggagcagcccatttaagaagcatcttgtaaataacaaagtgacaccttcgagattacagttgcagctatgcaagtcattcacagagtagctgagggctctcttctgaaggaggacccattacatgaaggtagacctttcatgtcttgttgccgacgtccaagtctcttgcggtccagaaatgccaggatggttgtttcaaatgcattgggtatgaattgcaccttgaatctgcccttccctttttcgattaaaccttttcacatagctgctgctgctccttagcagtccatcccctggacggaggcggcctctcaggacctggagcagagctgtagggagctgccgtctcttatggtagatgtggcccatcacaatatacctgctgcctggacaaaataaccagaacattaattcatagtgtcttttaaatgccatgaaacagaaaatgtaaggcctttaagaaacgcctaagctgcaatctattatcttgctgcacaagttgaaactgatattgagtctacaggcatctggtggaaacagcctagccacctttacaagataaccaaccaggccggtgtggtggctcacgcctttaatcccagcactttgggaggccgaggtgggcagctcacttgaggtcaggagtttgagaccagcctggccaacatggtgaaaccccgtctctactaaaaatacaaaaattggcagggcgtggtggcgcatgcctgtaaccccagctgcttgggaggctgaggcaggataatcgcttgaacccggcaggtggagggtgcagtgagccgagatcgaaccactgcactccagcctgggcgacagggcaagactcaatctcaaaaaaaaaaaaaaaaaaaaaaaaaaagcagtatgtaaccggaccacattacagaacaaaggtccttatcacaatctatcaggatttcccagagcacatgtctagaaagatgtgggagtgggtattccccgctaccaaccccacatacacacccaaaaaagcagcttttctaaactcggttctgtacagtcccttctggcaatggtgtttggtcgtccaccccatttgtcaacatctatttattgacagcccgctttgtgccaacccttgctgttctcacccttgagggtgggggctgacagggcttaaatcacagagtggccggaataatacctgtcgtctaaatcccattcatgtcattgtttcccatcgctcccaaaaaaaggctgggcgacctacagcccgggctgtggcacccacgttacaaacggtggtataaagtacatatgcagcgtcattcaggtcagtttcaataccaggtttaaactctggacacggcttattgcagctggaggagtccagggctaacatgtggactcggaagaagaagccgtcgggggtgaggtacaggcggttcatcttgtacagcccgtcccgatccaccagcagggtcaccagccggatgcccgcgcccagcacgtccacatcgtgcacgatcccgttcaccgctgcttccgaaaaacagtttggagaagagcattaccccgagttcctctcccagtcccccaggaggtggtttttagcaaccgcgaaacggcccgcacgggtcaggcgccctgggatctcgcgggcggattctccggggctcggaaaggctcgcggggcggcggggcggcggcgcggcggccgggctcaccgaattcgctctcgcagaacgcctcgcgttcgtccagatcggaccggcaggcgcgcgcgcagggctcagcgccgggctccgcgtccctctgcggcgggctgaggccgaagctgaggctgaagcgcggcggcggcgcgggcgcgggtcccggggccagcgcggcggcgcgcggccggttggggtgggcgtggccggcggagccctcggtggcgagcgcgggcggccgggcggcggggaagcgcagggcccgtgagcgcgcgcgtcgcggggcgtcctccgacgcgggctcgcggcgcggcgacgcgcggttctcggcttgcgccaggcgcgggcccggcgggccagcgggcgcgcgtgcggcctcccggaagctggcctggttgtcggccggcggtgggggcttccggcggcgcgggtcaggccaggcgcgggcggcgggagcgacctcggccgcgcgcggccgctgcggggcctcaaggagtggctgcgcgcggggccccggtgtctcctccgcgctcgggcagccgcgggagtccggctttctgctgtgcggcggcgaggctgtggggagagaagaggagaggcgggaaggcggtgggggaggagaagcagtgaggggaggccgtcggggaaagccgaggaagccgagaaggaagaagagggaaggggaggctgagacgggaggccgagaggggaagggaagccaggaggggaggaggccgctagtggggcaggggcgctgcagaagaagggctctgggagggggagaggagatagaggacaagggaggcttcgcaggcacctgcaagaggagagatgggagggaggcccggaggcctggaagtgaagcagggagaacccggacgcagcgtcgcggccaagcggggcacgcgcttcccaggccccaaaggaagaaggatacgagggtcttgacctctaagattatagcttttaaaattacaaccccctatttactctaagactaaacatgtcttacaacactggttagataacaaacttttttgcccttcctttaatatatacgtatatgtgtgtatgtgtgcgtgtgcgtgtgtgtgtgtgtgtgtgtgtgtatatatatatatatatataaaacatatataaacatccgcctctttgctatttacagtttgttgagaaagtaccaagagcaaaccccagggggaaaggtctcatattacaggttctcctaattctttaagcgcccctgacaacagaactatttggttttcccatccatgtttacactgtcatcccggtctctgcagaatcgagcatttgtaagtggatttttatctggcttcttggacaccacttactggtaaaccacagctaaggaaggttttaaaagcttggctgggaggcagagaggcccctggttaagtataaaagcacacgtcgcttacatttttttccccattagatgatggaggaaagactcctaaatggtatggcatgaaaacaaatttttaaaattattaatgattttccctagttctgcagacaggttggtgagtaaacctcagccagcttgggagctgggcacctttccataccagttacacaatttcacctccttgcttgcctgggtcccagtgccctccaaacaggcaagaactagcctttatttttctctccccttgcattaaagagatggatctgcccatttgcagctctggcaacacttcatttaaagttgatcagtcttgccaaatcgataatctgctttaaaatcagctttcacccagcaataatagctggttagagttcatgtttttgcaaagaggttgattctgactcattatgttgttaaacggttgtgccatgcacagctgaataaagttctggtggatatccaattcctgactgtcaactgttgacctcacaactgcttccccattgatataaccatctgttgtcatgggaaagattgtctgatatttgggttaaatgccactgaagtcattcaatttccatgtggaaaaataacccagagtaaattgccctgtgaggtacggaaactgtttttcccagagatagcgaagccgacagaacatccaaataaaagcaaaacaaaaacacgatcccccagagaacccctcatttcttcacgggctgagtaacttaatttcatttcgtgcatgaagtataagagtgtgtgcgtgttagttaaaccccggctcaggtgtcccaaggttgtgcgctggggctgcggggagagcaaagtgcccggggctgccggatttcggccccgcttccccccagccctccacagcgccccccgcagcccctgctcacccagtcgaggggggcggaccccgcggcgtcctgcgagcccggcccgggcacggctcccgaaaggcgcgccacgaccccttttgacactttccctcctccgtgatggagcaactacttaacatgcaaagttttccccagcctgcccggcttgctcgggatcatttcagtagctaaattggcttctttccgaaaaggctgccaagagacacgaaaccttggggacacactttgctcctttataagacgaacgcagacccggggtgtcctctcttgcgagctctgacccccctcctcgtcccacgtttcactgagcctccttcccagctcccccccacagatccccgctccgctcccagggccccgcactacaccaatcttactttttctctccgccaccggtgcttcgggggatgatccgacgatcaaacagaggagccagaaagctctagctgtcatttttgcagacagggttcccaggctctaaaagtgagcctggtcttttgcttgctttctctcccccaaccccttctccacacccccacccccgttcatgctaatgaggggcagcctttggggaaacgggaatcactcgctgagcagaccattggaacaaaaccgagccgcagggatttctccctcttccttcctaaggaggacgagcacatggccttgcaaagttgtccccgggaatgtctgtcctgtgatctgcgggcgaggagagcatcacagcctaaactttaaacctgtgtgcgtttgcgcgctggggtgggggcagcaaagggtggggtgacaagtgcagagaataagcgtgtttcgggactgagggactgggtgggggagaacgagtgacgggagcttttttctagattaggtcaacaacaaataggaaaatagtgcttaagacagcgtgggtttgtggaagggagattccagatgacagagaatgtatcctggaatgtgtgtgttaggcaatttctagagaaaccaagtcactgcttccttagtaaaactgtttcattatatatcacagctcattgtaacctctgcctcccggactaaagcgattctcgtgcctcagcctctcaagtagctgggattacaggcatatgccaccatgcgaggctaatttttgtatttttagcagagacgggatttcaccgtgttggccaggctggtctcaaactcctgacctcaagtgatccacccaccttggcctcccaaagtgctgggattacagcatgagccaccacgccgggcccagaggtctaattattaatcagaatgttgcctgttgaggccaggcagggtggttcatgcctgtaatcccagtactttgggagcccgagacaggaggatctcttgagctcaggagttcaagaccagcctgagcaacatggagagaacctgtctctacaaaaaatacaaaaattagccaggcatggtggctcgcatctgtggtcccagccacttgggaggctgaggtgggaggatcacttgagcctaggaggtggaggttgcagtgagccgagattgtgccactgcactccagcctgggtgacagagagaggccctgtctcaaaaaaaaaaaaaaaaaaaaaagaagaagaagaagaagaagaaagaaaagaaagaggaggagccaggcacagtggctcacgcctgtaatcccagcattttgggaggccaaggcaggcggatcacgaggtcaggagttcaagaccagcctggccaaattagtgcaaccctgtctctactaaaattacaaaaaagttagcagggtgtggtggcacacacctgtagtcccagctactcaggaggctgaggcaggagaatcgcttgaacctgggaggcaaaggttgcagtgagctgagactatgccattgcactccagcctgggtgatagagtgagacttttgtctcaaaaagaaaaaaaaaaagaggaggaggaggagaacgaagaagaagaagaaggagagcagggccaggtgtggtggctcacgcctgtaatcccagcactttgggaggacaaggtgggtcgatcacgaggccaggagatccagaccatcctggctgacacagtgaaaccccgtctctactgaaaatacaaaaaattagccgggcgtggtggcgggcgcctgtagtcccagctactcaggaggctgaggcaggagactggcgtgaacctgggaggcggagcttgcagtgtggcgccactgccctgccctccagcctgggtgacagagtgagactctgtctcaaaaaaaaaaaaaaaaaaaaaaaagaaggagaggaggaagaggaggaggaggaggaaagaagtttgcctgttgagcattaaatcaaagaaaataaatttgctggctgggtgcggtggctcaacctgtaatcccaacactctgggaggccaaggtgggcagatcacgaggtcaggagttcgagaccagcctggccaacatagtaaaaccccatatctactaaaaatacaaaaattagcgagtcatggtggcgggcacctgtaatcccagctacttgggaggctgagggaggagaatcgcttgaacccaggaggcagaagttgcagtgagccaagactgcgccactacactccagcctgggcaacagcacaggactctgtctcaaaaaaaaaaaaaaaaaaagaaaaagaaaaagaaaaaaaagaaaagaaatttgcctgttgagcattaaatcaaattgcagctaaggagatgagctaatcttccctcattcaggtgttagaggagtgaattatattctccatccaaaagagtaaacctctacagcccctgcaaagcttgggtataccagagtcagggtctccagaccctagacaagaccagataaacactagtaaattcatgcccttggggccctgtttatagatgtcctcagatccccttctttcacgtgctctttctttaagtcaagtggaataaaattcactaggcttaagatttctcagttacaaccacatctctaacataccttcttaccattacattcaaatcacccagaacctattgggggtgttcccgaaactcttctgttgcaggaatgttgtgaatgccctgaaacccacaccctgaaatgtagaggcagggagcaggctggatggctcccaggggctcccagaggctcctggggtggcaccagctggaagaacctgccagagtccagtcctgggtcttgggcagtgtctggcttgagccttagaaatcacactaatgggccaggcgcggtggctcacgcctgtaatctcagccctttgggaggctgaggtgggcggatcacctgaggtcaggagtttgagaccagcctgaccaacatggtgaaaccctgtctctactaaaaatacaaaaatagccaggcatggtggcaggtgcctgtaatcccagctacttggtaggctgaggcaggagaatcgcttgaacccgggaggcggaggttgcagtgagccgagatcgcaccatcgcactccagcctaggggacaagagcgagacttcgtctcaaaaaagaagaagaagaaaaaaaagaaaccacactaatggtggaaggtacaaagagttcaaagagactgatctatgtagccagaatgccagtttattaatttacaatgagaaatcaaatcagaaatgcaaactcatgtcagcctgggtagcattctctttctataaacaagccacagaggaagccaagttatcctcagggtgcttggtaatataaaccagagcctggggagtttgtcacctgattggaatgtttaacagtattggtttctgacagcctaagtgtttgtctctgcaataggtgtgtatacctgtcaggaggaagaacccaagagaccaactggcattcccttccttgataatttctggtattttgagtgtgtgtttctgcttagcagatatttattgagcatctactctgtgttgtataataaagaatttgaagtccaggcgcagtggctcacacatgtaatcctggcactttggaaggttgaggcgggcggatcacttgagtttaggaattcaagaccagcctgggcaacatggtgaaactgtctctacaaaataaaaataaaaataaaatagccagctgaggtggtaattctagagaacttgaattctctagagtgactcacagaactcaggatagcattttacttacaatgagttgtattattattttgttggttcgttattttatgtttcttttctcttattttaatagagatgggggtgggggccaggtgcagtggctcactcctgtaatcccaatactttgggaggctgaggaaggcagatcatttgaggtcaggagtccaagaccagcctggccaacatggtgaaaccccatctcttactgaaaatacaaaaattagttgggtgtggtggtatgcacctgtaatcccagctattcaagaggctgaggcaggagactcacttgaacccgggaggcagaggttgcagtgggccgagatcatgccactgcactccagcctgggtgacagagcgagactccgtctcagaaaaaaaaaaaaaaaaaaaattatcttcgttttaatgcacatttctttaatggcaggtgaaattttacatttttttcatagatttattggccatttgcatttcttcttttgttaattgcctgttcatatggtttgtctatatatgttccaaatatttcctgtcaaaattttgtttgttaaaaccttttagtgatttttgccatagaactttaaaattatgtatcataaaatccatcaaaaatttttttttttgaggcggattttcgctcttgttgcccaggctggatgcaatggcgccatcttggctgactgcaacctctgcctcctgggttcaagcaattctcctgcctcagcctccccagtagctgggattacaggcatgctccaccacgcccggctaattttgtatttttagtagagacgggatttcaccatgttggccaggctgatcttgaactcctgaccttgtgatccaccctacttagcctcccaaagtgctgggattacaggtgtgagccactgcgcctggccgagaaagactttcttgaaatcaaaattatatatatatatatatatatatatatatatatatatatatatatatatatatacacacacacacacacacatatatatacacacacgcgcatatatatatatatatatatatatatatatataaaatctccgtatatttttataatgcttatagttaaatcttgattccatctggaatttattttggtattgtagtctgatgtaagaatctaattttaattttttcttgagtaacagaaagttgtctaatccaattgacagataaatccatcccttcctaaatctgaaatctgagctatcatctttaacatagacagtatatttttttatttttttaatttttttgagatggagtctggctctgtagcccaggctggagtacagtagtgcgatcttggctcactgcaaccttggctcactgcaacctccacctcccaggttcaatcgactctcctgtctcagcctcctgagtagctgggatcataggcacacaccaccatgcctggctaatttgtatatttttagtagagacccggtttcgacatgttggacaggctgctctcaaattcctggcctaaagtgatccccccgccttggcctcccaaaatgctggtattacaggcgtgagccaccgtgcccggctagggtattatcattttcttcgtctaagctctaaacatttcttcttagatttaattcctgggtattttatatttttgatgtaatgtggatagcatattttttcttttatattttctgactggttttagtaggtgtctagaaaaactactaagctctttttcttttttttttttttgagacggagtctcgctctgtcgctcaggctggagtgcagtggcgcgatctcggctcactgcaagctccgcctcccgggttcacgccattctcctgcctcagcctcccgactagctgggattacaggtgcccgccaccacgcccggctaatttattttgtatttttttagtagagacggggtttcaccgtgttagccaggatggtcttgatgtcctgacctcgtgatctgcccgcctcggcctcccaaagtgctgggatcacaggcgtgagccaccgcgcctgaactttttttttttttttttttgagatagagtctcgctctgtcgcccaggctggagtgcaatggcgcggtctcagctcaccgcaagctgggcctcccgggttcatgccattctcctgcctcagcctccagagtagctgggactacaggcgcccgccaccacgccaggctaattttttgtatttttggaagagacggggtttcaccgtgttagccaggatggtctcgctctcctgaccttgtgatccgcctgcctcggcctaccaaagtgctgggattacaggcgtgaggcaccgcgccagcctgtttttttttttttttttttttttttttgagacggagtttcgttctgtcgcccaggctggagtgcaatgacgcgatctcagctagctgcaacctctgtctcctgggttcaaggggttcttctgcctcagcctccagagtagctgggactacaggttcacgccaccacgcctggctaattttttgtattttttgtagagatgggggtttccccatattggccaggctggtctcgaactcctgacctcgtgatccacctgcctcggcctaccaaagtgctgggattacaggcatgagccactgcgcccagctcaaatattcatttagcttttttattgcattaataagagctcttttttttttttttttttagacggagtttcgctcttgttgctcaggctggagtgcaatggcgcgatctcggcttaccacaacctccacctcccaggttccagcaattctcctgcctcagcctccgtagtagctgggactgcagacatccaccacacccagctaattttgtatttttagtagagatggggtttctccatgttggtcagcctggtcttgaactcccaaccttaggtgatccgcctgcctcggtctcccaaagtgctgggatcacaggtgtgagccaccacgcccagccatgcattaataagaggtttcttttttcttttctttttttttcttttagacagagttttgctctgttgcccaggctggagtgcagtggcacgatctcagctcactgcaagctccacctcccgggttcacgccattctcccgcctcagcctcctgagtagctaggactacaggtgcccgccaccacgcctggctaatttttttgtatttttagtagcgacggggttttactgtgttagccaggatgttctcaatctcctgacctcgtgatccgcctgccccggcctcccaaagtgttgggattacaggtgtgagccactgcgcccggccttaataaaagctttctaagctttgttaataatactaatcatagccatcatctttgttttattaatattcctcatttttagagagcatttcaaatattttactttcaagtaactaaaaatttgattttacacggattatatagagctatttttttttttttttttttgagatggagtctcgctctgtcccccaggctggagtgcggtggcacgatctcggctcactgccagctctgcctcttgggttcacgccattctcctgcctcagcctcccgcgtagctgggactacaggcgcctgccaccacgcccggctaatttttttgtattttttttatagtagagacagggtttcaccgtgttagccaggatggtctcgatctcctgacctcctgatccgccccccctcggcctcccaaagtgctgggattacaggcgtgagccaccgcgcccggcctatatagggttatttttatccacactcctgggctgttgtttttgccttaggaatctgacaaatattcatatttccttgttatgttatcagtgttgatattctactttcggccttccattttatcttctatctctactattatttatttgcttgtttatttatttatttatttatttatttattttttgagacagggtctcactgttgcttaggctggagtacagtggcaaaactcgatcaaggctcactgtggccttgacctcccggggctcaggtgattctcctaccttcgcctccagagtagctgggactacaggcacgcaccaccacacccagctaatttttgtattttttgtagagatggggtttcatcatgttggccaggctgttctccaactcctgggctcaagctatccaacctccttggcctcccaaagtgctgggattataggcataacctaccacactcggttttcctcgttattctaggagacattccggaatttgtacatttgttgctgatttcattttcaggagcatcagttctgccttttgctctttccaataaggatcttctttcctttctcccctcccctccctccgcccccgctttttttttttttttttctttattaatagagatgggatttcaccctgttgcccaggctggtctcaaactcctgggctcaagctatctgcccatctgggcctcccaaagcccagggattaagggagtaagccactgcacctggccccagtaaggggttgaaagctcaggaattaatagtcagcttccttttttgttcatcctgttgtttgttcatttcagtctattgccttcttataatttccttctttacaaggactatttctccttgttttgtttttgtttttttttgagacggagtctcactctgtcacccaggctggagtgcaatggcgtgatctcggctcactgcaacctctgcctcctgggttcaagcgattctcttgcgttagctgcccaagtagctaggattacaagtgcaagccaccacacccagccaattttttgtatttttagtagagatggggtttcaccatgttggccaaaatggtcttgatctcttgaccttgtgatccgccctcctcagcctcctaaagtgatgggattacaggcgtgagccaccgcgcccagccgagagtgcctgtttcttaaaattgtcttggccaggtacagtggctcacaccggtaatcccagcactttgagaggccgaggcaggtggatcacctgaggtcaggagtttgagaccagcctggccaacatggtgaaatccgtctctactcaaaatacaaaaatcagccgggcctgatgatgggcacctgtagtcctagctactccgggtgctgaggcatgaaaatcacttgagcccacgaggcagaggctgcagtgagccgaaattgcactactgcactccagcctgggcaacagagcaagacgctgtctcaaaaaaaaaaaaaaaatatatatatatatatatatatatatgtatgtatgtatttggcccggcacagtggctcacgcctgtaatcctagcactttgggaggccaaggtgggtggatcgcttgcggccaggagtttgagaccagctgggcaacatgatgaaactctgtctctactgaaaatacaaaaattagccggacatcatggtgctcgcctgtagtcccagctgctcaggaggctgaggcaggagaattgcttgaacttgggagacagaggttgcagtgagctgagatggtgccactgcactccagccagggcaacagagtgagaccctgtctcaaaaaaaaaaaaataattgtctctaggattatttgtcaacattatgtgaggtatgctctgcacatttttaaggagaaaatatttttatttttattataaaacattcaaagttatagagaatagtgtaatcaacagctgcacaaatataacccagttttatcagatcttagtattttcccatacttgtttctttcttttttttttttccagtggttaaaaaattacaaatatagtcgggcgtggtggctcaggcctgtaatcccagcactttgggaggccaaggcagggggatcacttgaggtcaggagttgtagaccagcctgaccatcatggagaaaccccgtctctactaaaaatacaaaattagccaggcatgctggcgcatgcctataatcccagctgcttgggaggctgaggcaggagaatcacttgaacccaggaggtggaggttgcagtgagccgagatcatgccattgcactccagcctgggcgacagagcaagactccatctcgagaaaaaaaaaattacaaatatagtttgtagtaaccatcctccaagtagccagcccccagtgtgcccactttttggtattcacatcccatatagtccccacctaccctgtagcagggttggtctggaagactgataggataggataatatacacttccaagattagattacagaaagactgaactctttttttttttaattttttatttccataggttattgaagaacagttggtgtttggttacatgagtcagttctttagtggtgatttgtgaaattgtggtgcacccatcacccgagcagtatacactgcacctaattaatagccttttatctgtcaaccccttcccacactttccctctgagtccccaaattccattgtgtcattcttatgcctttgcatcctcatagcttagctcccacttatgagtgagaacgtaggatgtttggttttccattcctgacttacttcacttggaatgataagtctccaatcccatccaggttgctgcaaatgccattaattcatttctttttatggctgaatagtattccattgtatgcatatatatatattatatatatatatatatatacacacacacacacacacacacacacaccacggtttctttatccactcattgattgatgggcatttgggctggttccacatttttgcaattgtgaattgtgctgctataaacatgcatgtccaagtatctttttcatatgacttagaaagactgaactcttatctggggtgtgtgtgttcttgctgtctctcttttagctcattcactctggctatgtggggaggacattcaagcagtctatggagatgtccatgtagcaagccagtgatgtcttcagccaacattcagtaagaaactgcagcctgccaacaaccaatgagcgaccttgcatgcatattttctgccagttgagtcttcagataagagtgcagctccaggccactgcttgactgaaacatcccgagagacctgagcagaaccatccagctaagtccctcccagattcctggcccacagaaagtgtgatataataaatggtttttggccgggcgtgatggctcatgcctgtaatcccagcactttgggaagccaaggcgggcagatcgcctgaggtcaagggttgaagaccagcctggccaacatggtgaaaccccatctctactaaaaatacaaaaattcgtggtggcaggtgcctgtaatcccagctactcgggaggctgaggcagaagaatcacttgaacctgggaggtggaggttgcagtgagccgagattgcaccatttgcactccaacctgggggacaagagcgagacttcatctcaaataataataataataaatattttttgttttaagctgctaagtgttgggaatagttttttttttgagatgggtctcactgtgtcgcccaggctggagtgcagtggtatgatcatggtttattgcagcctcaacctcccaggctcatgggatcctcccatctcagcctcccaaatagctgggatcacaagtgtgtaccaccacacctgactttttttttttttttaaagtagaaacaaagtcttgctgttgcccaggctggtctggaattcctgggctcaagtaatcctccctcttcagcctcccaaaatgctggcattacaggcatgagctaccatgcctggcccaagtgttaaaggcttttttaaattttatttttattatcatgtttttcttttgttcaaagtgttaagtcttttttttttttttgagatggagtctcgctctgttgcccaggctggagtgcagtggcacaatctcagctcactgcatcctccacctcccagtttcaagtgattctcctgcctcagcctcctgagtaactgggattataagcgcatgccaccacacctggctaattttttgtatttttagtaaagacagggttttaccatgttggccaggctggtcttgaactcctgacctcaggtgatccaccggcctcgggctcctaaagtgctgggattacaggcgtgatccaccatacctggcctagtattaaatctttataacaacataattacaagcttgagacttctattaccctgttttacagatgagtaactggggcacagtaaggttgagtaatttggccaaggttatacagctagtaattacatgataccaaaactgatagcttctgccagtgctcttaatataaggttgaaagaggccgggcgcggtggctcacacctgtaatcccagcactttgggaggccgaggcgggcagatcacgaggtcaggagatcgagaccatcctggctaacacgatgaaaccccgtctctactaaaaatacaaaaaattagccgggcttggtggcgggcgcctgtagtcccagctactcaggaggctgaggcaggagaatgacgtgaacccgggaggcagggcttgcagtgagccgagatggcgccactgcactccagcctgggcgacagagcgaaactcttgtctcagaaaaaaaaaaaaaataataataataataataagaaggttgaaggaaaaaagaaaagagccaattaacataaaacatagctgttagaagcctccttctacaaatggccatgaagtctaagtcgataattatatctgctttcttttttttttttttccttttttgagacagagtcttgctctgtcgctcaggctggggtgcagtggcgtgatctcggctcactgcaacctccacctcccaggtttgagcgattctgctgcctcagcctccagagtaactgggactataagcatgcaccaccatgcctggctaatttttgtatttttagtagagacagggtttcaccatgttagtcaggctggtctcgaactcctaacctcaggtgatccactcgcctcaccctcccaaagtgctgggattacaggcgtaaaccaccacacccagccaataatcatagctgccttcttccaccacttcttccagtccccttttgaaggatgcctcacagggacacccaatactttattcccataagacctgacttcttggtggtcttgtttttactgggttgctctacttttccattaaccaggtcttagggtcaagagcctgctaagatgtgtccccagtgaatttttggtttccagacatagtctccttcctcttttaagtaacagagccattttcctcttgctaatcatatatacagaggctaattcagtgatggttttagtcagctcaggctgctattacaaaataccacatactgggtggcttaaacaacagataatgatttctcacagttctggtggctaggaagtccaatatcaggtagatagcatgattgggtgctggtgagggctcttttcctagcttgaagacggctgccttcttgcctcacttggtggacaaagagaagaaaggctctctagcatcttctttttttttttttttttttttttttttgagatggagaatctcagatgctctgcctgtccaggctggaggctggagtgcaatggcttgatctgggctcactgcaacctctatctgctgggttcaagccattctcctgcctcaccttcccaaatagctgggattagagatgtgtgccaccatgcccagctaatttttgtatttttagtagagacggtgtttcaccatgtagccccggctggtctcaaacgtctgtcttcaagtgattcacctgccttggcctcccaatgtactgagattacaggcatgagccactgtgcccagtcatctggtctcttcttataaagacactcatcccatcgtggagcactgtctgcatgatctcctctaagcttaattacttcccaaaggccccaccttcttcttcttttttttttttttttttttttttttgagatggagtgttgctctgttgccaggctggagtgtagtggtgcagtcttggctcactgcaacctccccctcctgggttcaagcgattctcctgcctctggctcccaagtagctgggattacaggtacacgtcaccacacccggctaacttttgtatttttagtagagatggggtttcaccatgttggccaggctggtcttgaactcctgacctcatgatccacccacctcggcctcccaaagtgctgggattaaaggcgtgaaccactgtgcctggccaggccccaccttctaataccatcacgctggggttagggcttcaacgtaagaatctgggagggatgcaaacacttagcccataatagtggccgccttctctccttattgattcagcagcatgaggaactttaaatggacagcctcagctgggcaaggtggctcatgcttctaatccaagcacattgggaggccgaggaaagacaatcagttgagcccagaagttccaaagcagccttgggcaacatacttgcccatagtttaaaaattagctggacagggctgggcatgatggctcacacctgtaatccccgcactttgagacgccaaggtgggcggatcacctgaggtcaggatcatgagaacagcctggctgacacggtgaaaccctgtctctactaaaaatacaaaaattagctgggtgtagtgaagcgtgcctgtaatcccagctactccggaggctgaggcaggagaatcgcttgaacccggaggcagaggttgcagtgagccatgatcataccactgtactccagcctgggtgacagagcaagactccgtctaaaaaaaaaaggcatggtggcatgtgcctgtagtcccagctactcaggaggctaaggtaggaggatcacttaagcctcggaggttgaggctgcagtgagccatgattgcaccattgcattccagcctgggaaacagagtgagattctgtctctaaataaataaataaacaaacaaacaataaaataaatggccagcctcggcttccagttgaataaaaccacaataatgtttcctgatctacacattccttcctttggcactaggacctctggacccactcagtcccgggtccgtggcaaggaaaacaaaaattcttcatgtgaattcttaggggccacagtgggaggagccactcccacctcctctcctcgcttcctggactcattctaacattgtctaagtctaggaacggcagtgctagcagaagccccgcaggcaagggaggaaaatccacacccagaacacgggtctgtcgctgtgagaggcactgtccgcacaccccagtctggtcactacaaaaaaggatggcctctcacggcgcgaccttcaccttggagcagcgccctctgctggtcacccctaagatctgtggccacgcgcgtctcccttccaatcctcaccaacagaggtagggattggtgttttgttgttgttgttgttgttgttttgtttgtttgtttgtttgttttgagacggagtctcgctctgtcgcccaagctgaagtgcagtagctcaatcttctcgctgcaacctccgcctccgaggttcaagcgattctcctgccttagcctcccaagtagctgggattacaggcacccgccactatgcccggataatttttgtatttttaggagaaacagggtttcacaatgtgggccaggctggtctcgaactcctgacctcaagcaatctgcccgcgtcggcctcccaaagtgctgggattacaggcgttgagcccccgcgcccagcctcttcactgtttttgtagcctttttctccttttatttgaagtttctgatatcccccagtttcactgaagcggtctttgtgattctgattctcatcccccttgttgcttttgtgggatttcctagaagagtagaaaaaaaattgcatcttcactgtcattttaatgctggaacctggcaaatgttaaaagcattatagtattataatttcaaatactgtgttaaggggcaggcatggttggctcatgcctgtaatcccagcactttgggaggccgaggcgtgcggatcgtttgagctcaggagttcaaaaccagcctgggaaacatgatgaaattccatctctacaaaaaaatacaaaaattagctgggcgtggtggcgcacacctgtagtaccagctacttgagaggctgagatgggaggtaagcccaggaggtggaggttgcagtgaactgagatcacgccactgcactccagtgtgggcaacagagcaagaccgtgtctggggaaaaaaaaaaagtcaacccaatcaatgaatggtgaccctagcaaacacctgatactttatttatctggctcaattaaaataaaaaagagaattttatgcaaacatttcagaccactgaattttgccaaatgattccatttcctaaggattccatctttggttctaatgtaatgtatattccctgtggaggaaatggatttctccaaataactggatccatagtcatgtaatgctagtggggaaaatcgccccagcttagatactatcaaatgaattccaacatatttgggctctcccattatttgtcttctcacctggcagcctgcctctcttggcaatgctagggttccagaatcaggccctaaactcagcaagggcctccacgagggccatattacaccctaagattcccagatgtctatttggaaccacctttgacttatgtccttactttgcccctgaaagtgcatggggagaaagaagaaatcgttaaaacagggacaatcaatgtggccctaaatgttttactgtggcctatcaataattcatcataccatccctgtttccaaggctttacggcagtttcttccccttgacacagttgacattttgggctggatcatctttttttttttttgagacattgtcttgctctgtcacctacgttagagtgcaatgacacgatctcggctcactgcaacttctgcctcctgggttcaagcgatcctcctgcctcagcctcccaagtagctgggattacaagcacccaccaccacacctggctactttttgtatttttagtagagacggggtttcatcatgttgctcaggctggtcttgaactcctgatctcaggtgatccatccgcctcggcctcccagagtgctgggattacaggcgtgagccaccgcgctcggcctggatcatcatttttttgtgggggactgtcctgtgtggtttaagatgttaagcagcatccccgacctctgcccactagatgttaatagcaaccccttccagttccactgtgacaattgcaaatctccagatattgccaaatgttacttggggagcaaaattggcccagttgagaaccacgggaataaaggaagcagaattatcaggataaaacagacaattcacctctatcacagcagagttttttgtttgtttattgtttgttttcagagacaaggtcttgctctgtcacccaggcaggagtgtggtggtgtgatcctcactcaggaggttgagaagcagtgccactacaattgtgccactacactccagccttggcaatgatcttatctcaaacaagaagaagaggaagaggaagaagaagaggaagaagaggaaggggagagggagggggaaggagagggagaaggagatggagactctggggctcaaggcattctccttcctgaacctcccaaagtactgggattacaggtgtgagtcactgagtgtgttaggtttctctagagggacagaactatatataggagtttattaagtattaagtatattaagtattataggagtttattaagtattaactcacatgatcacaaggtcctacaaaaggcggtctgcaggctgaggagcaaggagaggcagtccaagttccaaaactgaagaacttggagtcagatattcgagggcaggaagcatccagcatgggagaaagtcggctgggagactaggctagtctctcttttcacatatttctgcttgcttatattctagctctgctggcagctaattagcttgtgtccactcaggttaagggtgggtctgcctttcccagcccactgactcaaatgctaatcttctttggcaacaccctcacagacacacccaggatcaacactttgtatccttcaatccaatcaagttgacactcaatattaaccaacacactgagcctggccaaagctggactaattgtaagatttttgtctggaaccttgattcaggagcaagtggcccgaggatgatgaaaaccatcagacgtggccaggcatggtggctcatgcctgtaatcccagcactttgggaggctgagatgggtgggccatttgaggtcaggagtttcagaccagcctggccaacatggtgaaaccccatctctactaaaaatacaaaaattggccgggcatggtggctcacacctgtaatcccagcactttgggaggccaaggcaagtggatcagctgaagtcaggagttcgagaccagcctgaccaacatggtaaaaccccgtctctactaaaaatataaaaaattagttgggcatggtggcgagagcctgtagtctcagttacttaggaggctgaggcaggagaattgcttgaaccaggagatggaggttgcagtgagccgagatcctgccactgcactccagcctgggcaacagagcaagagtccatctcaaacaaacaaacaaacaaacaaacaatcaatcagaggcgctgactacagtgacggccatctggctctgacatttgttgtgcttccagcttcttgctatttcaggggctctggtcttgattcttgcaggttcccaaacctggtcctacagctccccacctcctgtctctttagtggtttagtgggcaccccctcccctctatctttccagtgagttataatgtgctttgtttaggtagggctggtttgtttccatcattggcaacaagagggagttggtcaaggagtctaaggagttgtctggagaaccaagaaaaagatttcctggaagcctagaaaaagtgtgtttccagaagaaagattcgttaggagtttcaaatgtcagggctaagttaagcaagacaaggactgaaaggtgttccttaaatttgtctatgaagaggccactgctggggaggagtgtgtcaggtggcagtggagggaggacagcaagtgaagaggagactctggacacgtagacaacactcatgatgcagcctgactgctcggagagagggcaaacaggacttgtgagaagcgccataggcccggggctgagcttggaatgggtggagaacctgcaacctgcagaatgtttttctttttttgttttttttgtgtcggagtcttgctctgtcacccaggctggagtgcaatggtgtgatctcagctcactgaaacctctgcctcgtgggttcaagcgattctcctgcctcagcctcctgagtgtctgggattacaggtatgtgtgaccacgcctggctactttttgtatttttagtagagacaggtttcaccatgttggccaggctggtcttgaactcctgacctcaggtgatctgcccacctcggcctcacaaaactctgggattacaggcttgagccactacgcccagccttgcagaatgtttttggactccgaggcaagagccagcagagggacaaagtaaaggcactcaatcactgtttgctgactccagctcaatggactatggtgagtgaggctagaaacatcttccagagagaaggagctgggctcacaaggaggctaaaggaggggaaggaggtgggagaggcagatgagcaccgtggaggactgagccgctgtcagaagctcaaagggcagagaacccaggatgagtttgttgtgcccagccttgggggctgcacattccaatatctgtgcatttgagggaccaaggatacattgtcactgtctgtaatttccagacgctgcctgcaggtgggggacaggagaccatgcagtttagtttttttttgtttgtttgttttgtttttttttttgagacagagtctcactctgtcgcccaggctggagtgcagtggcgcaatctctgctcactgtaaccttcgcctcccgggttcaagcgattcttttgcctcagtctcctgagtagctgggactacaggaccgtgccactatgcccggctaatttttgtattattattagacacgggctttcaccatattgaccaggctggtctcgaactccttaccttgtgatctgcctgcctcgacctcccaaagtgctgggattacaggcgtgagctactgcatctggccgttttgtttgttttgagatagcgtctcgctctgttactcaggctggagtgcagtggcatgaacacagctcactgcagcctcaatctcctgggctaaagggatcctctgacctcagcatcctgagtagctgggaccacaggtgtgtgctactgcacaccaggctaattttttttttttaattttgttgttgagatggggatttcaccgtgtttcccaggctggtcttgaactcctgggctcaagtgatcctctcgcctcggcttccccaagtgttggaattacaggcatgagccacttcacctggcctcagttcagattttttgaatacctactgcatccaaggacctaatgtggccaccaatattcaactctgagatacctaccagaaattgaactggaaattattcttggtcttctgtatttattaatgctttctggtttaaacattcagcactaagtgctcggtctcgatctcttgacctcgtgatctgctcgccttggcctctcaaagtgctgggattacaggcgtgagccaccgcgcctggcctaatttctaatcttaagggacaaaggtgtccgttaaaattctccactggttattagtagttgggttttcttttaatacactttttattttggaataaattcagatttacagaaaagctgcaaatgtagggcagagttctggtgtatcccttaaccctaatgttaacatcttacgtcactatgtatatttgtcaaaactaagaaatcaacactggtacattactagtaatgaaattccacactgtacagtatttgagtccactgctttttttccactaatatccttttctgtttcagacttcaacccaggataccacactgcatttagtgtttagttgtttttaaagagtagtgatgaactcagtggatgttccttttgtacaagtgtgcaagaagagtttaaactgtccaggctaggccaggtgcagtgggtcatgcctgtaatctcagcactttggtagattgaggcggatggatcacctgacgtcaggagtgcaagaccagcctgggcaacatggtgaaaccccatctccactaaaaatataaaaattagccaggcgtcgtggcgcattcctgtaattcaggctactctggaggctgaggcatgagaatcgcttgaacctgggaggtggagttgaagtgagcccccatcatggcaccgcactccatcctaggcaaaagagcaagactctgtctcaaaaataaataaataaataaaattttcaagctagtcaactgaactggtctgaaaggcttaaactctgattattgtgtgttttttttatttcactaatttgcagatctctcacacacacacatatgcacaaacacacaaactgttctaattacaatttgttgttcataatattttgaagacagcaacaataaattatgtttatcatagttgtatggggtaactccacagttactctgctgtaaactttccttggtaccgtcctggaaatctgaggccagcacagttggacctgctcacacgtcccttgggataagaatagggacaaagttttgtaagtgtggctgcccattgttaatctcagcttgaaaaagtagacagaactcagaaggctgaggcagcagaatcgcttgaacctgtgggacagaggttgcagtgagccaagatcgcgccattgcactgcagcctgggctacaatatcgagactccgtctcacacacacaaaaaaaagtagacagaaaaagagatgatgccacatgtctagtcaccagtttgtgtttgctaaggtctttttcttttaaaaatcagtataagttaagcaagaataaatgcttcctcaatgtgtgcaatttttatttgtcaattatatctcaataatgctggggaaaaacactttttaaaatttttatttttattattattatttttttaagagggagtctggctctgtcacccaggctggagtgcaatggcaccatctcggctctcggctcactgcaacttccagcttccgggttcaagcgattctcctgcctcagcttccagagtagctaggattagaggcatgcgccaccacgcccggctaatttttgtatttttagtagagacaggatttcaccatgttggccaggttggtcttgaactcctgacctcaggtgatccgcccgccttggcctcccaaagggctgggattgcagttgtgagccatcgcggccggcctaaaagaattttttttttgagacggagtttcgttcttgttgcccaggctggagcgcaatggcgtgatctcggctcactgcaacctccgcctccccggttcaagcgattctcttgcctcagcctcccgagtagctggaattacaggcgcgcaccaccacgcctggctaattttttgtgtttttagtaaagacggggtttcaccatggccaggctggtcttgaacttctgacctcgggtgatccgcctgcctcggccttccagagtgctaggattacaggtgtgagccaccgtgcccagccaagaattttttttttttaagtaaatatttctttttaggggtcagatttcgtgttcacttgcaagctctcaatgacagtgttttttgcctcggcctccgaaagtgctgggattacaggcgtgagccaccgtgcccggccattttggttttttaattttttttttttttctttttgagacagagtttcgctcttgttgcccaggcttgagtgcaatggcgcaatcttggctcactgcaacctccatctcgcgggttcaagcgattctcctgcctcagcctcccaagtagttgggactacaggcatgcgccaccacgcccggctaattttttctatttagtatttcaacagttggtcagtctgttctcgaactcctgacctcaggtgacgcctcggcctcccgaagtgctgggattacaggaatgagccatggcctggtttttaaattctttttaaagattgatacttcatattgattttgaatttttttgtttttgttttttgagacagggtctcgctccgttacccaggctggagtgcagtggcccaatcatattataacttactgctaattttaaaatttttttctggggaggttggggttgggggtggtgtcgtctccttatgtcgcccaggctggtctcaaactcccggactcaagtgattctctcgccttggcctcctaaagagctggaattacaggcgtgagccaccccaccccgaataacaagtgatattgtgttacattcgtataatgtgtaatgatcaaatcagggtaactgggatagctgtcacctcaaacactgatcatttctttgtgttaggagcatttcaaatattttcttctagctactttgaaatatacagtaaattaccgttagctataattaccctactgtgctaccgaacactaggtctgaccgtattttagtacccattcgctgacagtgtttttaaaactctcaaaagcacctctttatttgtgataacgatagctgccaagaaccatctcttaatcaactgtccaatgatcgccctctcttccaccaaaactaatctcacgcgacccagatgggactcgaacccacaatccccagctccggaggctgatgccttatccattaggccactgggtcaccacaggatccggcttctcacaccctctccttacgcgatgccatcatcacgctcccgcccccgcgcatcgcggtctcgcgccgagaggcaagtgatttggcagccgcccccagcggcggcggcgcgcgcctgcgcttttctgcgtccctgtcggccgcctggacttcccgcgcgctgcgccatgggcccggagcggccgcaagggccccggagggcctgcgcgtgaccctccgagctctcctgcccggtaactgcatggcatccaccccgccgggtttgggtgctatccttcctgtcgggttcttcaagcgttcttaactccagttgtccattgggctcacctggggaattttaaacaaggttccagtgcctgccccatcccattctagttcagttgactggggcggacctgggcgtcttcattttacaaagctccccgggaccctctgcagggcaggcggcgttgggagccactgcagatcgcgaaatcctcccgcagcttccctctcccgccaaccttcttgtccctgtcttctctttctttcccgcgtttattcagcagagattaatgtgataacctgttatgtgctgggaactgttgggctcctgggtgaacaggcttttccaccccacgagaacttcaaatctgacctttgtccctacggccattcaccttcagccgttttcctccccctgactcttctttccctctggagtaaagggaaaatgaacataacaaagtccctaagtgcaaaatagtacgggtttggcttcccccttccctcagccaacatcctgaagttaagttttgagtaaagacttggagactttctggtgccatgcacactatctgtatgtttgttgcatgtaaagatgctgcatttgtgatttttacaaatacacaatttcgttttcttcttagacacgtaacacttgttcttcacaagtctgtttaaaatatggctaagccggccgggcgtggtggctcctgcctgtaatcccagcactttgggaggctgaggctggcggatcacttgaggtcaggagttggagaccagcctggccaacgtggtgaaaccctgtctctactaaaaatacaaaaaaattagccaggcgtttggtggcgtgcgcctgtaattccagctaccagggaaactgaggcaggagaatcgcttgaacctgggaggcggaggttgctgtaaaccgagattgtgccactgcactccagcctgggcgacagagcaagacggtctcaaaaaaaaaaaaaaaaaaaaagataagccaggtaaagaaaatcgaaattgggccgggctcggtggctcacgcctgtaatcccagcattttgagatgcccaaacgggcggttccctttaggtcagaagttcgagaccagcctggccaaaaaggtgaaccctaatctctactaaaaatgcaaaaattaccggggcgtggtggcgagcgcctgtagtcccagctgcttcggagggtgaggcaggagaatcgcttgaaccggggaggcggaggctgcagtgagccgagatctcgccattgcactgcagcctgggtgatagagcaagactctttcaaaaaaaaaaaaaaaaaaaaaagggaccgtgcgcggtgactcacgcctgtaatcccagcactttgggaagccgaggcgggcggattatgaggtcaagagttcgagaccagcccggccaacatggtgaaaccccgtctctaccaagaatacaaaaattagtgggccgtggtggcgcgtgcctgtaatcccaggtactggggaggctgaggcaggagaatcgcttgaacctgggaggcagaggttgcagcgaagcgggattgcactactgcactccactctgggcgatagagcaagactctgtctagggggaaaaaaaaagaaaatcgaaattctgtaagtcggagttaaccactcctacaaaatgtattaacattttggtgcatatctttctaatttagtctgcgtgtgatgtgttatccttgttatccttggcctgtgaactctgaggcattcaggaaatgcttttcatgaaaacaggttatttattgcgttgacatttgcaccgatggtgcagaagcaatagcgggtgaaatagcaaatttaaggcatttgaactaaactaataagagtcatattctttaccttcgtgcactggcagagggaaaaagccaggtttactgaagcatatccttggtgacgctgtaagaataattaagtgtattaagtttcaacgcttgagtgcacagctttttaatattttctttgacaatgggaagtatgaataaatcacctctacgcataccaaaatacaatggtttttgcttgagtaaagcacttgtgggatgttggagttgcactccgaactagctgcttttcagtcgtaccgaattttcattgaaggaacaactgaccgacaaactagattattcagagttgggcattttgcagatattttttagaaaatgaacaaagtgagcatgtcgcttcaaggaaaacaatatgcactgtttgtggctaatgaaataacctacattttcaagggaaggccgggtgcggtggctcaggcctgtaatcccagcactttgggaggccgaggagggcagatcacgaagtcaagagatcaagaccatcctggccaacatgttgaaaccccatctctactaaaaacacgaaaattagctgggcgtggtggcacgcgcctgtagtctcagctattcgggaggctgaggcaggagaaccgcttgaacctgggaggcgggggttgtaatgagcctagatggcgccagtgcactccagcctggcgacagagcgagactccgtctcaaaaaaacaaaaaacaaaaaaacaaaaaaaccgtcaagggaacatttaaaagcttgaaactttgtatccaccactgtaagcttgatagctttcaaatatttaaagacatttctgtttaatgagtgcaatgttttgatgttgtacaattcaatgtgtcaacacttggaagatctgcatacctcttagtgtaacgtgtttcaaatgaccagtgcataatgttcgatattcctgcatgggtaaaggtaaaatatgcatccaagtggagtacagactaatgagccaccaccgcacggccagactaatggattttaatgtaacagaatgcagaaagtttggtgatatgctctagttttcacattgcagcatattttcttaattaattgactttattattttttatcagttttaggtttgcagaaatattgagtggaaagtacagagggtacctgtatattccttcactttccctcaccaatttcccgttattaacagcttgcattagtatggtatattcattacaattgataaactaatactgatacattataattaacttcattaacaatataataattaatattaataataatatttaatatacattattagtaaagtccatagttgatacttgcagggttcactctttgtattgtgcattctatggtttttgacaaaggtataatgtcatatatccacaattacagtatcacacagaatagtttcactgcctttaaaatgccttattccacctattcattctccccttcctcccctgaaaccctttccaaccactaatctttttttttgaaatggagtctcgctctgtcacccttgctagagtgcagtggcacaatctcggctcactgcaacctccgccttccgggttcaagcgattctcctgcctcagcctcccaagtagctgggactacaggcacaagccaccatggccggctaatttttgtattttttagtagagacggggttttaccatattggccaggctggtctcgaactcctgacctcgtgatccgcccgcctcagtctcccaaagcactagtattacaggtgtgagccactgcacgtggccccaaccactaatcttttttgtctccatagttttatcttttctagaatgtcatttactgtagttggaatcatacaatgtgtagccttttcagactggcttccttcatttggcaatatgcatttaaggtttctgcatgtttttctcatggattgatagctcaatttttgcttgcttgtttgtttctttgtaagtttgtttttgagatggagtcttgctgtgttgtccagactggagttaagtggcacgatctcagctcactgcaacctccaccttctgggttcaagcaattctgtctcctgcctcagactcccaagtagcagggactataggtgtgtgccaccatgcctggctgaatttttttttttttttttttgagatggagtctcactctgtcacccaagctggagtgcagtggctatgagctcggctcactgcaacctccactcctgggttcaagcaattctcctgcctcaacctctggagtagctgggattacaggcacatgccaccacacctggctaatttttgtatttttagtagagatggggtttctccacgttggccaggctggtctcaaactcctgacctcaggtgatccacccacctcggcctcccaaagtgctgggattacaggtgtgagccaccgcacccggcctatattttgtattttcagtagagacggggtttcactgttttggccaggctggtctcaaactcaaactcctgacctcaagtgatctatctgcctcggcctcccaaagtgctgggattacaggtgtgagccaccatgcccgatctgcttgtttttttgagactggttctcactctgttgcccaggctggagtgcagtgatgcaatcacgtcttactgcagcttccaactcccaggctcaaatgatccttccgcctcagcctcccaagtagctgggatgacaggcgtgcaccaccatgcctggctaatttttatattttttgtagagaccaggtttcaccatgttgcccaggctggtctcaaactcctggactcaagcaatctgcccacctcagcctcccagactgctgggattctaggcatgagccaccatgcccagccttcttttcttttctttctttcttttttttttttttgagacagtcttgctctattacccaggcaggagtgcagtggctcaatctcagctcactgcaacttctgcttcccaagttcaagtgattctcctgaatcacatcatggctagctaatttttgtatttttagtagagacagagttttgccatctctactggagttggccaggctggtctcgaactcctgacctcaggtgatccaccggctttggcctcccaaagcgctgggatgacaggcacgacccccacgcccggtctggacttttgttattattattattttttttagagacagggtcttgctcagtcacccaggctggagtgcagtggctcaatcatagctcactgcagccccaaactcctgggttcaagcaattgtcctgccacagcatcccaagtacctgatactacaggtgcacaccaccacacctggataatttttttttttttttgtagaaaaagggggtctccctctgttggttacacaaacccctggcttcaagtgatcctcctacctcaacctaccaaagtgcagggattacatgcatgagccacggcacccagccttcttatttgaggtggcaaattcctttactcataagccaacttaggattgggtcttctgcctcttgcaaccaaaagagtcataaacaatacactcaggaatttgtgagaggaagataggattgacaacaaaggtggtttggagaaggggtagatgtatggatcttttggaatgaacttagaaggtgtggatttgagttatatggatgttcacccaaaggcctccactgtggaataggctattaatattcaggtggccatgatggcctgctctgtagatgtccatcatcctccttcccctgccaggctagtgcttgcttaatgggatcatgaaccacatggccaaggcagcagagacagaggctatgcatacgctcagtatcattcacttcctactactgagtctggtctggctactatttctgccgggggcccaaccagccctgatgttggcttcacaccctgaagggaccattcaattacctggtgatcatgacaataacattggaccctttccataatagatcaggaggaagagacattttatctggattgggccatatttactttccaatgtgtcactctgctgccagcaccaccatccattcactttcttttttttttgagacggagtcttgccctgtcgcccaggctggcgtacagtggcatgatctcggctcagtgcaacctgcgccttccaggttcaagcgattctcctcccccagcctcccgagtagctgggattacagtcgcgtgccactacgcccagctaaatttttgtatctttagtagaaatggggccaccatgttgaccagcctggtctcaaactcctgatctcatgatccgcccacctcggcctcccaaagtgctgggattacagacatgagccaccgcgcccggcccctcctttcactttgcaagtcttttatgctgtcatggattcccaaagagacaacactgctccaaccaagaaactcacctcacagtgaaattatggaattgcaaatcaaaataatgagataccgctacacatctattgtaatggctaaaatgcaaaacactgacaacaccaaattctggtgaggatatggaacaagaggaactctcattcattgctagtgggaatgcagaatggtacagcaacttcaaaagatagtttggcagtttcttacaaaggtaaacatagtcttaccataccatccagcaatcgcaatccatggtatttatccaagtgagttgaaaacgtatgtctacacaaaaatctccacctgcacacaactgtttatagcagctttattcgtaattgccagaatttgaaccaaccaagatgtgcttccataggtgaatggataaacaaactgtggtacatccatataatggaatttctttttcagattttttttcttttctttcctttttttttttgagacagggtcttgctttgttgcccagactggagtgcagtggcgtgatcactgctaacctcaaactcctgggctccagtgatcctctgcctcaatctcccaggtagctgtgtacaggaatgcaccatcatgcccagctaatatattttttattttttgtagagatggcgtcttgtcattttgcccaggctagtctcgaaactcctgggctcaagcgatcctcctaccttggtatacaaacatacaatggaacattattcaatgataaaaaagaaggctgggccaggcacggtggctcacgcctgtaataccagcactttgggagcccgaggcgggcggatcacctgaggtcaggagtttaggaccagcctagtgaaaccctgtctctacaaaaaaatacaaaaattagccagacggggtggcatgcacctgtaatcccagctactagggaggctgaggcaggaaaatcgcttgaacccaggaagtggcggttgcaatgagtcaagatcacgccactgcactccagcctggggagacggagtaaaactctgtctcaaaaaaaaaaaaaaaaaaaaaagtccagagataggtctgcctttcagatgtgtcttgattaggggtttaaaagaaatcagggaggccgaggcgggcggatcacgaggtcaggagatcaagaccatcctggctaacatagtgaaaccccatctctactaaaaatacaaaaaaaaaaaaaaaaattagccgggcgtggtggcgggtgcctgtaatcccagctactcgggaggctgaggcaggagaatggcgtgaacccgggaggcagatcttgtagtgagccgagatcgcaccactgcactccagcctgagcaacagagtgagactctgtctcaaaaataaataaataaataaataaataaataaataaataaataaataaatacaataaaagaaatcagaatctggtgtctctcttgaacctgttctactttgttctattgtcactctattttcagacaggctccaggctctttccttacagtggtaaaatatttacaacagctccagactttacatccattatcataattccaagtgtagaggaagtacatctcacccctattagtcaaagtcccaggcctgattcttaccagtccctattgagttatatgctctccatgaaaccatacctgtgacctacgggaagggtttcctccttggcttatgccagttagagtccacccagggtagggagtcaacctcatccaaccacatggactggtgtgggtgagcgctggttcctgcaggaaagttaggaattactcttttaatagaggtgtgcatatctgctgggcaacataaataaaattaatgacccttataccaaccagccagctaagctggttttcactgtttgggaatcagtgtggatctcacctcgggatatctgctctttcagaaaaatgtgtaccagctgcatgcttcaaggttctacccactagggagtttgactgcttactttccttcagagctgtgtgttagtccattttgtattgttataaaggaagacctgaggctaggtaatttatatttttttaaaaaggggaggtttagtggctcatggttctgcaggctgtacaagaagtatggtgccagtatctgtttctggtgagggcttcaggaagcttcgagatggagtctcactctgtcacccaggctagagtgcagtggcacgatcttggctcactgcaacctcttcctcccaggttcaagtgattcttctgcctcagcctcctgaatagctgggattacaatcatacgccaccattcccagctaatttttgtgtttttagtagaggcggggtttcaccgcgttggccaggctggtctcttaactcctgacctcaagtgatccacccaccttggcctcccaaagtgttgggattacaggcatgagtcactattcctggcccaggctctttttaacaatcagacttcagccaggcacagtggctcacacctgtgagcactctgggaggccgaggtggggagattgcttgagcccaagagtatgagactagcctgggcaacatagtgagaccccgtctccattttaaaaagaaaaagaaagggccgggcgcggtggctcacgcctgtaatcccagcactttgggaggcggaggcgggtggatcacgaggtcaggagatcgagaccatcctggctaacacggtgaaatcccgtctctactaaaaatacaaaaaaaaattagctgggcgtggtggtgggcgcctgtagtcccagctgctcgggaggctgaggcaggagaatggcgtaaactcaggaggcagagcttgcattgagcggagatggcgccactgcactccagcctgggcgacagagcgagactccatctcaaaaaaaaaaaaaaaaaaaagaaagaaaaagaaaaagaaagaaaaagagtcagatctcacagtaactgacagtcagaactcccttgttaccatggggagggcaccagccattactaagagatctgttctcatgacccaaacgcctcccactaggccccacctccaatactgggagtcaaatttcaacatgagatttggaggaaacaaatagccgaactatattaggttgcctacatgtgaggccatcggtcaggagcaatccacttcagctaatgtcaacatagtatgcagagcacctagcttgaccttcatcttgctggtcattgattgtcccatgaggccacaggtgtaatctgctggcaggagtcagcagctgggaacataagtcacttgttcatgcagttttcttctaccttctgggtccttttggtccaggtccctcccatcccacttctacttcgttatggagtgctgctgtgcccacccaacttcatgggatcagataacccccaattcgtcatgagtagctcacattacattggttttattttatttgtttttgagacagggtcttgatctgttacccaggctatggcgcagtggcatgatcacatggttcactgcagcctcgacctcctgggctcaggtgattctcccactttagcctcctgagtgtctgggactacagacacgtgccaccagggctggctacacaccaagcctggttaatttttttttttttttttttgagacagggtcttgttctgtcacttaggctggagtgtggtggtatgatctctgctcactgcaacctccacctcctgggttcaagcgatcgtcccgtcccagcctcttgagtagctgggactacaggtgcatgccaccacgcccagctatgttttgtagagatggggttttgccatgttccccaggctggtcttgaactcttgggctcaagcaatccacccatctcggcctcccaaagtactgggattacaggcatgagccaccccacctggcaggttacatttttatttggagttcagtaggtgatcaagagctctttctcaaaacgaggatagttccttactgaagagcctccatatgtggcactaatctctgcagtttccccaaggatgcagttttgcttctgagttactgtttttgtggggaagggagcaccaatggctttcatttagccaagcctgccacagtagccctgacgcagagggtaagaaagccagcgtgggggttctgccagcagctgggaacatccatcccacccgcagactcaggaacaggcaagtaaacctaggatgggtttggagactctttggctgacacagggacccaggttccttccatgttgcagctctaccaccttcctcatagggctcccagtgtggccaggcttgtctgcttcaagccagggaaaggagagagagagagagacaccattttgtaagcgctaacccattagacaaatacattactttcacttgaactagacttatggcctcacctggatccaaggaaactgaaaagtagagtcactggctaggcacccatccacccatctaccagcaacaagtagaccaaatggaaggtgaaacatgagttttggtggagaattagggattgctgccacactcaaatcagaaagggctgtatttggctgagcacggtggctcacacctgtaatctcagcactttgggaggctggggtgggcagatctcttgagcccaggagttctagaccagcttgggcaacatggcaaaatcccatctctacaaaaaaaaacaaaaattagctgggcgtggtagcatatgcttgtagtctcagctacttgggaggccgatgtacgagaatcacttcagcccaggaggttgaggctgcagggagctctgatcgtgccactgcactccagcctggatgacagagcaagaccctgtctcaaaaagaagaaaaaattgagaaagtggtgtgtttgagggatgttgtatagttcacagaactgaaacatgagtttacaagacggcctagaaagacagtaactaaagggcctcagcctcagtagctggtggtcctatgtctttcagccagctcagctccaggcccctttctttctttctttgcatgttttaactcaacattcatattttgaaggaagataatctgaatggatttttttttttttttttttttgagacagcatctcactctgccacctaggctggaatgcagtggtacaatctcggctcaatgcagcctccacctcccaggctcaagccatcctcccacctcagcctcccaagtagcggggactacaggcatataccaacatgcttggctaattttttatttttatttatttatttttttagacagagtgtcactctgttgctcaagctggagtgcagtggcacaatctcagctcactgcaacctctgcccctgcgttcgagcgattcttgtgcctcagcctcccgagtagctgggactacaggcacgagccaccgcgcttggctaatttttgtattttcagtagagacagggttttaccatgttggctgggctggtcttgaactcctgacctcaagtgacccacctgcctcggcctcccaaagtgttgggattacaggcgttagccactgctcccagcctctgctaattttttttttttttttaatttttgtagagatggtggtttggaggagggcatctcgctatgttgcccaggctggtgaatggatattaagaactgaatgtttgcatccccctcaaaaattcatatgttgaaaacctaactcccagtatgatagtatttggaaatggggcctctgggaggttgagatgaattcatgagggtggggccctcatgatgagattagtgtccttataaaaagagccatcaggccgggcgcagtggctcatgcctgtaatccaagcactttgggaggctgaggtgggtggatcatgaggtcaggagttcaagaccagcctggccaacatggtgaaaccccatctctactaaaaatacaaaaatgagccaggtgtggtggcatgcacttgtaatcccagttacttgggaggctgaggcaggaaaatcacttgaaaccaggaagcagaggttgcagtgagctgagatcgcgccattgcactccagcctgggtgacagggcgagactccatctaaaaaaaaaaaaaaaagaagagacaccagagagctttcactctcccttctctgtgctaaaatgaagagatcatgctagcacacaattaggcgatggtcatctggacgccaaagaggggggcccttcctggaaactgaccactctggcacccttatttcagatttcgtgatccagaaatgtgagaaaaataaatgtttgttatctaagcctcccagcctgtagtactttgttatggtaacctaagcggactatgctagtggactaacacatcagctaaaacttggtcataaatgataggacttttttttttttttttgagacggcgtcttgcattgtcgcctgggctgtagtgcagtggcaccatctcagcttactgcaacctctacctcccaggtgtaagtgatgcttgtatcttagcctcctgagtagctgggaccacaggtgtgtgttaccacacctgcctaattttttatattttttagtagagacagggttttgccatgttggacaggctagtctttttttttgaaatggagtttcgctcttgttgtccaggctggagtgcaatggtgtgatctcggctcactgcaacctctgcctcccagattcaagcaattctcctgcctcagcctcccaagtagctggggttacaggtgcttgccaccacgcccagctaattttttgtatgttttagtagagacagggtttccctttgttggccaggctggtcttgaactcctgacctcaggtggtctgcccacctcagcctcccaaagtgctaggattacaggtgtgagccactgtgcccgacgatatcgtatctttcaaaggcaattttgggcattatacttctgtttcaggttgtttttaggtgcaagtacagaatagtggttcagaacacagatcctggaaccagactgcttatggctgaatcctgtctttgccatttactggctgtgtgaccctggaacaagttacataaacacttgtgattcagtgctctcttttgtgaaatagagcaaataacagtactacctcacagttgtgaagatcaagtgtattaatatatggtaaacactcagaacacttctgggcacatagtagtcagtattttcaagcaaaagaaactcaacttggcttggtatggtggtcaggcctataattccagcactttgggaggctgaggtgggtggattgcttgagctcaggacttcgagaccagcttgggcaaaatagtgaaaccctgtctttacaaaaaatgcaaaaattagctggacgtggtggtgtgtacctatagtcccagctatttgggaggctgaggtgggaggatggcttcagcccaggaggcagaggtcgcagtgagctgagatcgtgccactccactccagcctgggcgacagagctagaccctgtctcaaagaaaagaaaaaaaagaaaaaaaaaaagagaagaaactcaacttgacaatacaaaagaaatgtgtatcggatctcctacctgcaaaccttcagagatagagcaggtcagacctctcaaggtttccctacagttttcttattcagatttctaggactcacatcccttagttcagaagaacagaggctgctttcctacctccaaccagtaaacaaaaggcagaggctgtccaactggatgaatttaggtcatgtgcctgcccctgaaccattctcagtagctgagagaatgccacacagtgattggtttaggggtgaattccttccacattcttgcatttagggggatgggattatgctgattaagagtaggtccaaccctttatgaactctggctttacgatgaatgaggctggcattaatgcctgcaaaaatggacaaacttgctgtttgaatttatttatagtaagaaataaaccatgaaaacttttctaaaatgtaatcttttagaacacaaaaaaattgcagaaacaaaaatggcccagaatcctgatgctctgttgaccatctttgttttgtttgttcgtttgagcatatggcaaaaaatgcaaaattcagaaatgtgtaatgagcatagaatgttactataacaattgaaaaaacttgaacacacactacatactaaacaacagcatgaaatttcagtttttctgaatttgatgactgcagtgtggttatataagagaatgtcttttcttaggagagacaccgtgaaacagaggaaaaaggacatgattctgaaactttctcttaaagtaacatattaaaatcacacatatgtacacgcgtgcatatgtatacatatatatgtatagagaaagcaatagcaaatgtggcaaaatgttaagatttggcaaatctggataaagatttgcaattctgctgcatttgaaattatttaaaaataaaaaacttgagtttttggagaaacaggcataagaaaccttttgtttccatatttgcggcttctatacagtcttttatgatgcaattaaaaaaaaactaaactaaaaaatataacacaaatcttccctcccatagtagccagaaacccccgccgagtactttgggtgtcataataggaaaaaaatgcaaagcaatatgtttttctataaagattacttatttactaattagaatttttttattttcatgaagatcaacaacaaagtttttaaaataatgacttagagaatcattttgtggtatttgtttaaggctgtcgcccaggaaaacgcccaaggaccatgcacgcttcaaccctatggaaacacgaacggcccagggaaccgccccttcgcgctgcttgacgggatctggagtcctcccgctccgccccgccaggcgctcagggaccgcccggccgctccctcaccgcccggccgctccctcaccgcccggccgctccctcaccgcccggccgctccctcaccgcccggccgctccctcatctcgcgatgccatcctctttttttttttttctttcccccctcccactcgcccccaagccctatgactccctcccctcccaacgtgtttttcaaatccaccaatgggcacacagcttaggctcgaaccagccaatcggaatgcggagtcaccgggaaatttaaatcgcgccggccggctgcacgagccacacggtctttgagctgagtcgaggtggaccctttgaacgcagtcgccctacagccgctgattccccccgcatcgcctcccgtggaagcccaggcccgcttcgcaggtacagactcaggcggcggcccggcccgagcgctaacggcttgcccgtgggcggcgttcgccttttgggttgggggagggaggccccgggtccacgccgagcctggctctgcctcccgcgttgactaggcctcgggggcgacgttcattgaccaggcggctgagtttcgcggggtctgcgggtttagggcgccgacgctctgcaaacggcagcggaggccttaacgcgtcgcggccgggagaatcggagcgagccaggcttgagggcgaatgtcccgggaggacttgtggcggccctggtttcgcctcctcctttctcgttgcatcttccccggcgtgggggcaggggctgggggtggcagttgggagcaccgtctctgacacctaggccccgggggtggctctgccaccaagtcgtaggcgagcgtaatgaaagcaaagatagcaaattgtaaggagggctttgacttttgtcatcttctgaatgacgcacagctgatgtcatcctaattaagcgcattcactcctagtctctggaaatgcaaatcaaatatgcgagatgcggcactgcatttttaatgttgaccataatgtaatgatgaagcaaatttttatttaattttcgagtctgcacctattttggccaagtaaagacagtaaaatagggagagcctcctgaggatctgaatttattgccctggcacataatttttagctgtaagttgacttggttcccctactttgtcttgaattaactattagggactctggagtatcgaactaggctgtcagaaacggtggatacatgtggctagtccaaattgaaatacgctgtaagcttaaagtacacaaaagatttcaaagatggagtatggaaaaagaatgtagaagatgtcagttattttatatattgataacacgttgaaatactatttggatatgttgggttaagtaaaatacattattaaaattagtttcacttgtttcttttctcctttttaaaaatatggctactaggaagtttcaatttatatagcttgcattctatttctgatggagagccctctccaggaagtctcagccctttagagggaagggggacacttcccctttgggtaaagctatttcatagtgccgaaaacatgatgatcccccctctagtatacaggtgtggattcagtagatgcttgataattcagttcttatttggtactattattgacaaaggaaaatgataaaggaaatatttttctcttcccccatcttttagctttctccctttgtctcataaccatgtccaccaacgagaatgctaatacaccagctgcccgtcttcacagattcaagaacaagggaaaagacagtacagtgagtaccttctgttgctttcctgtggtggtatttaaatgggaagacatttggaaaggggtgaaaactgaggtatttaaaaaaaaaatgccctcacttagcaacaaaaactggtgtgataggtgaaacggcatgttatcttttctcaaggaaatgaggcgtcgcagaatagaggtcaatgtggagctgaggaaagctaagaaggatgaccagatgctgaagaggagaaatgtaagctcatttcctgatgatgctacttctccgctgcaggaaaaccgcaacaaccaggtaaaaaatgtattttagtttatgagttacgtgaaatccagaaaatcagtagggacttttcttagaaattcaagtaaacttaacatttctagtcttaacggttttaactatctgtgaacatctttttctctgtttgcaattagtaattgtcttctttcctgccttctgtaatccactgaagctgatttaggatcttcctttagctctgaccttccttcagacttccctgcatttctagctactagctgggtaccttggcctgaccagtgtgtccagagccagccagtttctggtttatttcttcttttttttttttttcccccgagatggagtcttgctctgttgctcaggctggagtgcagcagcacaatcggctcactgcaacctctgcctcatgggttcaagcaattctcctgccacagcctcctgagtagctgggattatgggtgcgcatcaccacgcttggctagtttttgtatttttttgtttttgtttctttgagacagagttttgctctgtcgcccaggctagcgtgcagtggtgcgatctccgctcactgcaagctccatctcccgggttcacgccattctcctgcctcagcctcctaagtagctgggactacaggcgcccgcaccctgtctggctaattttttgtatttttagtagagacggtgtttcaacatgttagccaggatggtctcgatctcctgacctcgtgatccacccgcctcagcctcccaaagtgctgggattacaggcgtgagccactgcccggcctgtttttgtatttttagtagaggcggggtttcaccatgttggccaggctagtcttgaactcatgacctcgtgatatgcctgccttggtctccagaagtgctgggattacaagcgtgagccaccaggcccttcccgtttttggtttatttctgccttttttggtattctctatgtttttgtatttgtcaccagctttgttcaggactttccttctgaaatatttacagtagcctcctaatttatcatatccttctttatgccatatactattttcctgaaatttttcctgaagtactgctttagacctgtgttttcgctccttaaaatccatactccaaattgcttgaacctgggaggtggaggttgcagtgagccaagatcatgccattgcactccagcctgtgcaacaagagtgaaactccgtctcaaggaaaaaaataaaaataaaataaatccatactccagctgggcatggtggttcatgcctgtaattccaacactttgggaagctgaaatgggaggatcactggaggccaggagtttgagcccagcctaggcaacataggaagacctcgtctctataaaaagtaaagttagctgggtgtggtggcgccggcctttagtcctaggtattcagggggctgagacagaagaatcacttgagcccgggattttgaggctgcagtgagctgtgattgcaccactgcaccccatgctgggtgacagtgagaccctgtctctaagaaatccctactctatgaaggccttccataaagtagacttaacttagattttcaaatttatctttcatctgggccctttcctacatgtttttctcacaatatgcttccttttttttttgttttgagacaaaaccttggtttgttgcccaggctggagtgcagtggtacgatcttggctgactgcagcctccgtctcctgggttcaagtgactctcctgcctcagcctcccaagtagctgggatcacaggggatcaccacgatgtctagctaatttttgcatttttagtagacacggggattcaccgtgtttcccagtctggtctcgaactcctgacctcaggtgatccacccgcctcggcctcccaaagtgctgggattacaggcgcgagccacttcgcccagccaaacataaaccatttatatttgcagcaacacttaaccgtggaaatatgtagattataaaattagatatgaaaatcctcggccgggtgtggtggctcacacctgtaatcccattactttgggaggccgaggcaggtggatcacctgaggtcgggagtttgagaccagcctgaccaacatggagaaactccatctctactaaaaatacaaaattagctgggcatcgtggcgcatgcctgtaatcccagctactcaggaggctgtggcaggagaatcgcttgaacccgggaggtggaggcggtggtgagccgagatcacgccattgcactccagcctgggcaagaagagcaaaactctgtctccaaaaaaaaaagtcgggcatggtagctcatgcctgtaattccagcactttgggaggctgaggcaggtggatcacctgaggttggcagttcgagaccagcctgaccaacatggagaaaccccgtctctactaaaaatacaaaaaaaaaaaattagccaggcatggtggcgcatgcctataatctcaggtacttgggaggctgaggcaggagaatcgcttgaacccaggaggcggaggtggtggtgagccaagatcatgccactgcactccagcctggggattgagtgaaactccgtctcaaaaaaaaaaagaaaagaaaatcctcagaacgttgcctatgacttcatgtctttctccctcaaagtatatctgaatgcaagtgattgagactaacgtagaaataatcttcagtctgctctgattcttgatttttgagacaaggtcttgtatggcgacaggcaaacaccaccatgcctggatattttttttttttttttttttttgttgggaggtctcactgtgttgctcaggctggtctcacctgagctcaagccatcctccctcctgagcctcccaaagtgctaggcttacaggtgtgagccaccatgcctgtccttctcgttcattttttaaaattgttcaaagctgccttttttagcgacaaaacacttggatactccataacttgagactccagtgagtccatgacaacaagtttggaaactgttctacatataaaataatgaatatttaacaggcaaaattaaatgtagggctaaatatttagtagctggctataagcctaacgatgtttacacttgccttcacaagtaagtgtggattttattgtttgtatttaatcttaatgataatgtgcaaactttcacttttcttctagggcactgtaaattggtctgttgatgacattgtcaaaggcataaatagcagcaatgtggaaaatcagctccaagctactcaagctgccaggtaagtcttgtctgcgatagcatgggtagcctaagaaatttgtgtttttagatttttttttggggggtggggcaggaagggacagacagatagtacaaggaaagattaggccagccagccataagccaaatagtattttttatttattaatttttttgagaggggaggccttgctattttgcccaggctggcctggaatgcctgggttcaagcagtcctctgacctcagcctcctgaagtgctgggatcacaggtgtgtgccattgcacctgcccataaagtttttaccaaagtaatgtttcaagtcactggcaggggaaggaagaaataaatagtaagtgggattgagacatgcatttagaatgatagatccatttaggagataagtataatttgacctttacctcccactatacgtggatatttatgatataatagaaaggattaataagttctatagcttgacagtgtgcagaagaaaaatttcaatggtaaattatcattaaaaagttctaggctgggtgctgtggctcattcctgtaatcccagcactttgggaggccaaggggtcggttacttgagcccaggagtttgagaccagcctgggcaacatggtgagagccagtttctacaaaagaaattattagctgggtgtggtggcacatgcctgtaatctcacgtgtttgggaggctcaggcacaataatcacttgaacccagcaggcggaggttgcagtgagctgagatcttgccactgcattccagcatggcgacagagcaagactctgtctcaaaaaataaataaataaaataacttgggtgtggcggtgcacacttgtcgtcccagctactaaggaggctgaggtgggaggatcacttgagcccaggaggtcgaggctgcagtgagctgtgatcgtggcactgcactctagcctgagtggagtgagatcctatttcaaaaaaacaaaatgtgcttaaccacaactatcagaacaaattcagtgagagtataaccctgtcagaatgtgaaaagtttttttaaaaagtgacaagatctggagtagatttctgcagggatggaaaggagggtaatctacattaatttctggaaaaatggtagttaattataccgcatacatagcaccatacaagtaatctgttcagcttctcttaggttccagaatgtctcagcatttagtgatttacttaaaaggttgtctgaagttctaaactcttgaattgcattttatattggtttttacacaaactccttttgttaatcactgtcaacttttatttctctttttgttcccctttaggaaactactttccagagaaaaacagccccccatagacaacataatccgggctggtttgattccgaaatttgtgtccttcttgggcagaactgattgtagtcccattcagtttgaatctgcttgggcactcactaacattgcttctgggacatcagaacaaaccaaggctgtggtagatggaggtgccatcccagcattcatttctctgttggcatctccccatgctcacatcagtgaacaagctgtctgggctctaggaaacattgcaggtacttggacttgaagttcttttgactgaatgtatctaatcgtaattagttggaagaaaggccttgttataagtaatagtgactttgtcaagttttgagcttgctttcaagcccttattaggaatgaaagtgtcgtctttacaaaggcagcagagggccatctaagtaagtttgggagtttttgctggtgcattcagtcactgaaaattgatggtgttggacaaggtaataaaattaatcttgcctcggccgggcatggtggctcacgcctgtaatcccagcactttgggaggcagaggcgggtggatcatgaggtcaggagattgagaccatcctggctaacacagtgaaaccccacctctactaaaaatacaaaaaattagccgggcgtggcggcgggcgcctgaggctgaggcaggagaatggcttgaacccaggaggcggagcttgcagtgagccgagatcgcgccactgcactccagcctgggcgacagagagaaactccgtctcaaaaaaaaaaaaaaaaaaattaatcttgccttttttttcaggtgatggctcagtgttccgagacttggttattaagtacggtgcagttgacccactgttggctctccttgcagttcctgatatgtcatctttagcagtaagttactaacatgagtaaagttactcacttcttcattctaatttcccccatcttctcaaaagacagaacctctcattgcctattttttttcccccagtgtggctacttacgtaatcttacctggacactttctaatctttgccgcaacaagaatcctgcacccccgatagatgctgttgagcagattcttcctaccttagttcggctcctgcatcatgatgatccagaagtattagcagatacctgctgggctatttcctaccttactgatggtccaaatgaacgaattggcatggtggtgaaaacaggagttgtgccccaacttgtgaagcttctaggagcttctgaattgccaattgtggtaagttatttacttgtagattaggacataagtataagaagcatgatcagggctgggcgtggtagtggtggctcacacctgtgtaatcccagcactttgggagaccaaggcaggtggatcacctgaggtcaggagttcgagaccagcctggccaacattgtgaaagcccatctctactaaaaatacaaagaaattatctggacatggtggcacgtgtctgtaatctcaactactcgggaggctaaggcaggagaattgcttgaatctgggaggcagaggctgcagtgacccgaaatcgtgccattatactccagtctctcaaaaaaaaaaaaaaaagcataatcagttgatagtaatattgaaatattgcctatttcaggccatgatgggcctcttgttaaaacttttagggtatagaatttctaaagtgctggggaaaaaataaccagcatcaacatattttttttttttcagactcctgccctaagagccatagggaatattgtcactggtacagatgaacagactcaggttgtgattgatgcaggagcactcgccgtctttcccagcctgctcaccaaccccaaaactaacattcagaaggaagctacgtggacaatgtcaaacatcacagccggccgccaggaccagatacagcaagttgtgaatcatggattagtcccattccttgtcagtgttctctctaaggtaacgaagtcttaggatttaatcaagtcatttttagtatttatagaaagctgtgcttgataagcttcttcacgtgcaagaatcttgggttctactaggagtcctttgctgaacaatacccagtaaccccttttacttaaggttggatagaaccttggtactttcagtcattgtttttgtgaaaaagtactcttggaatcttatttgtgcaactgttctgaaataaaaccatttccttatgtttaataggcagattttaagacacaaaaggaagctgtgtgggccgtgaccaactataccagtggtggaacagttgaacagattgtgtaccttgttcactgtggcataatagaaccgttgatgaacctcttaactgcaaaagataccaagattattctggttatcctggatgccatttcaaatatctttcaggtaagtcctatcaaggtggctttgtttgaatttggacttgataataatcagtttactatttagacttgggggagggcagctgtaagtttactcactagtaagccacagaatcagaaagcctgtttatgtggccacccctttgattaaaaatgaggcaggcattataaaagatacaaaagagacgacaagtggatggtgtgacctgaatcggagtcaggcgcttatgtggactcatcacacctgtttacttggttgatttaatttcccaatttcataccgatttttggtgacattaaatttgaatgacttggccaggcacggtggctcatgcctgtaatcacagcactttggaagtccgaggtgggtggatcacctgaggtcaagagttcgagaccagcctggccaacatggcgaaaccctgtctctgctaaaaatgcaagaattagccatgtgtggtggtgggcgcctataatcccagctactcagaaggctgaggcaggagaatcgcttgaacccgggaagcggaagttgcagtgagccaagtttgtgttattgcactccagcttgggcaagagtgaaactgtcttaaaaaaaaaaaaaaaaaaagttgagccttcaataatggatgctagcgtatctgttactgtgtataaataatttgtcagtatgtggccagtatttcttcttcccctcatctaatcccctaagttattttgaagcaaatctgtttttttcatctatagatatttatgtatctctttaaggttgaaaatttaaaggaaaactaacctacataccattccatatgtccagtaaatccttaataccaacacacattctgtttggggacgtttagtttagcactccataggccatctttgcccttagacaccttgactacaccttgtgatgacataggatgctttatgaaacaatacacccctgttcccatagcagaccagttgaactggaatgtagtgttgttttaaaagttgcccgcatgattttgatacatagaaaaggttgggagctactactgattgtaagatctttggctccagttgaagtagtgctaaaagcaggtacagatccaatcacattgagtgtcaacaaaatataaaatggacataaaactatgataggcttgatgaaggaattgttaggtgcttatttctgcctgacgtatcaatattcaaattattgatgttttcttcattaaaataaaaccagagtatatgccagtaaacttggattttttttttttttaggctgctgagaaactaggtgaaactgagaaacttagtataatgattgaagaatgtggaggcttagacaaaattgaagctctacaaaaccatgaaaatgagtctgtgtataaggcttcgttaagcttaattgagaagtatttctctgtagaggtgagtaatggatggtaatattaataacaacttggaaacataaagtcaaggccataagcctttttttcccttttaaaaataagtgtcatatctttgttaaatatagtaaaatatcagtgtgcatgggacataatgtacttatttgcccctctagtttggcttgatggtaataaaatctttttaaactgagattttaaaagccaccagattagtttcaaatgaacaaccttgagaatcttagaatatcttgagggtaagttaacgggtgtcattgtaggaggtgatagagaagtaggccaaactcatcaccatgctctgggcctaatacagtcttttcctattgaaaagtgacggttggggaagaaaaaaatctcggcctgtttgtgttactgtagtagctagcatttatgaattggcaaagtttcagagaccctccctcctctatgtcaaatactataatatcatacaggattaaaggtgtaatatgcagatcaagacctagagattaaatacagacttcaggtaggctgctgcttggaatacttatatcatttttatacttattttttaatatatttccaggaagaggaagatcaaaacgttgtaccagaaactacctctgaaggctacactttccaagttcaggatggggctcctgggacctttaacttttagatcatgtagctgagacataaatttgttgtgtactacgtttggtattttgtcttattgtttctctactaagaactctttcttaaatgtggtttgttactgtagcactttttacactgaaactatacttgaacagttccaactgtacatacatactgtatgaagcttgtcctctgactaggtttctaatttctatgtggaatttcctatcttgcagcatcctgtaaataaacattcaagtccacccttttcttgacttcaccatgcctatgtgttgctttctaatttggggcctttaatgttgctagtgaaaggtaacctgtccaaactgatgggattaaccagaggtagtcctggctgcagtttttgcagaagaatgaataacattttctggaaaccctcagccagtgtctccttaagtctccttggccagggagatgggctaaacaccgtaaatttaatcataaatctctgctggagctacaaatggaattctttcctcccaaacttcaaggccgaatggggttccaaggtaaatcacggctgcacatgggcctcatctgggaaagtacccagttctgtttcgttgatgaggggcatgagggtccaccatgtgtcttttttaaaaatgtaattcccaagggctcctgtacagtgtaggttgatagccactactctttgagatggtgtctcgctctgtcacccaggcgaaaccctgtctctagtaaaaatacaaaaaattagctgggattacaggcatggtggtgggagcctgtaatcccagctactcaggaggctgaggcaggagaatcgcttgaactccggaggcggaggttgcagtgagctgagattgcgccactgcactccagccttggtgacaagagcgagactcttgtctaaaaaaaaatcccctttgataatatatctttacctataactttaatttttgtatttgtttttgttgtaagcaagggaggaaaggtaatattcctaataccatttggcaattatagtaaaaactgctgacacttactttgcttgttgaaataatctgaaaagagtaacattaaaagatgtcagtgttaaacatttcacaaagtattctttcattgctatattgcattttggctaaaaataatcaggctacttgattatttttagaacaaaggaaatcaacattctgtttcctaatgttgattttttttttctctcatcaatctggctgcatcatcactgaagaaaaaacggggtaatttttcgttactgtaaatccttattgttaagattttttatttcagcatttggctgctttaattgcataacagcagtaagagcaaagtcagttttgttcataggagccattggaaaccttgtcagatacaggacccaagttcagaaggccattaaggcctggctgctccttacccctctccacccttgctggagcttgccaaaacccagtggactgattttggaaagcccttgaaacgtgtcatttcactaatggtgctttcttttgggattgggctgttgacctaatttgtgatgaacaaaacccggccaaatcatgcagcctccctctaactccccatgggaaagtgttagagaaaagtgttttagcaacatcacccatttaagtttcataaccccagctaataaaaatgataagaaacacccaagctatcaactagggttttttgagggcagaagtgcaatttaattttgagcacttgcatgttaaatgacatgttggcatagtttgaaagctaattctagtgtctgaacgctcagttcctcctaaatatttgggacagtttcataacactgtgtaggaggtgtatgcatcgaaccctcttaaactgatcagttcgtgcgttccaggcttttcacaatcgtaaatgtcttttcccatcctagttgtgggaggtagcatggtgcagtgaagtggactagtatttaagagccagatctgtctgaattcaaatcctgcctctttattgtgtcagtgaaagaccttttggtggggcagctaagtgctggcataagaaaagtatagatactaattcctacataatagaaatatcctagatgagtattacggctattccaaactttttgtttttgggaatagctgtaataactgaagaaacaaagtttcgctgtgttgcccaggctggtctcaaattcctggcctcaagctatcctcctgcctcagcttcccaaagtgctgggatttgcaggaatgagccactgcacctggctgcctccaaccttttaacaccaaagatttctgtttgttcttacatagactcttgttttgatatattttaccttctaggctaagttgattattactcttctttttttttcccccttatcagtcagatacacataacataagatgaccatactggattgttcatatacttaatgatgggattctaccgaaaagtcagatgttttgtcagcctttaggtcttttaggggcttggcatagctttctgaacagtggaactggctcaaggagggcccactgtgactaagttcctagactggctgttagcctttgcagtatctcagtgagaggtccagctgtcttcctgtgcccactggttccctttctcttaattctattggacgtaataattggagcacctcctcccctaacttctcattggccatgagaacaggactgaaccacccaagtccaacttggtgatggaagcttgtcagtatcaatacctgataggcccctaatactagtgttaatgaagtttctttaatgagcaaacacttgactgttgagacagccaccacaaagccatattttctactatgaagaaactcatgtttagaacttgaacaagtttaggcagaaatattggaagcttatccataaaaacaagggaatatgaggaaagattggatgaatgagaaaactttgaatcaattcaaaattaaaattaatggtcaaaggatgatatccagaaggcatctcccgattgtggctgcaaaaatacatattttaaaagcaaaactgttgaaatagaggagaaatgtagaaaaacatgtacgaatgagatggtctttttctttttttttgagatggagttttgctctcgttgcccaggctagagtgcaatggtgtgatctcagctcactgcaacctccgcctcccaggttcaggagattctcccgactcagcttcccgagtagccaggattacagacatgcaccaccacaccaggctaattttgtatttttagtagagatggggtttctccatgttggtcagggtggtctcaaactcccgacctcaggtgatccgcctgcctgggcctcccaaagtgctgggattacagacatgagacaccacgcctggccaagatggtctctttcaaccctttgtcttagactaaagttgtaggtgaccaatgactgtcaccctactctgttcttgcccatcctttcaaccaacatctcagccactcagcaaagattaacttggggaacacaaaactaattcattttccttactttctctccctttcccttccctttcccatccctttcccttcccttccctttctttctcccttccttccttcttctctttctctctctcactctttctttttctctccctctctcccctccctccctccttccttcttctctttctctctttctttttgctctccgtgtctcccctccctccctccttccttctctttctctctttctttttgctctccctctctcccctccctccctccttccttcttctctttctgtcactctttcttttttctctccctctctcccctccctccctccttccttccttccttccttcctctttctttcttccttttcttcctggtaactctttaaaatgtattttcctagttacagaaataatactaattttagaaagtttgaaaaacagaataccacaaagattaaaataataacctaaaattctacctttggattgtatattttggcatgaataagaattcttaacctgtgtaacctgagatccaagataggttatggggctcctgaacctctgaaactgtatgcacagtttactgttaaatacatgtgggtgcttttcaaagaaaggggaatatagcctggggaaaattaggccctcaaaggcagagctaccttcaaaatattacaagtttcaggtgtagttcctttccatttcttttctttttttgtttcttttgagatgaagtctcactctgttgcccaggctggagtgcagtggcaaaatctcggctcactacaacctccatctcccaggttcaagcaattctcccacctcagcctcccgaatagctgggattacaggcgtgcgccaccatgaccagctaatttttgtatttttagtaggagacggagtttcaccatgttgggcaggctggtcttgaactcctgacctcaggtgatccacctacctcagcctcccaaagtgctacagatgtgagccaatgcgcccggcctatttcctacacttttgtaaatgtgctttttttttttttttttttttttttttttggagatggagtctcgctctgttgcccaggctggagtgcagtggcgtgatctcggctcactgcaacctccgcctcccgggttcaagcgattctcctgcttcagcctcccgagtaactgggactacaggcgcatgctgccatgcccggctaattttttgtattttagtggagacggggtttcactgttgttgaccaggctggtctcaaactcctgagctcaggcgatccgccggcctaggcctctcaaagtgctagggttacaggcgtgagccaccgcgcccggccttttttttttttttttttttttgacggagtcttgttcttgttgtccaggctggagtgcaatggcgcgatctcggctcattggaacctccacttcccaggttcaagtgattctcctgcctcagcctcctgagtagctgggattacaggcatgcacctctgtgtccagctaatttttatatttttagagacggggtttcaccatgttgaccaggctggtctagaactcctgaccttgtgatctgcctgagaggtgacagcgtgctggcagtcctcagagctctcgcttgctctcggcaccgcctctgcctgggctcccactttggcgtcacttgaggagcccttcagcccaccattgcactgtggtagcacctttctgggctggccaaggccagagccggctccttcagctggcagggaggtgtggagagagaggcgcgagcgggaaccggggctgtgcgcagcgcttgcgggccagctggagttccgggtgggcgtgggcttggcgggcccgcactcggagcggccggccggccctgccggcccagggcagtgaggggcttagcacccggaccagcggctgcggagggtgtactgggtcccccagcagtgccagcccaccggtgctgcgctcgatttctcgccgggttgtagctgccttcccacggggcaggcctcgggactgcagcccgccatgcctgagccttcctccgcctccgtgggtttctgtgcagcccgagcctccccaacgaatgccgccccttgctccacggcgcccagtcccatcgaccgcccaagggctgaggagtgctagcgcatggcacagcactggcaggcagctccacctgtgaccccgctgtgggatccactgggtgaagccagctgggctcctgagtctggtggggacgtggagagtctttatgtctagctcagggattgtaaatacaccaatcagcaccctgtgtttagctcaaggtttgtgaatgcaccaatggacactctgtatctagctgctccggtggggccttggagaacctgtgtgtcgaatctctgtatctaactaatctgatggggatgtggagaacctttctatctagctcagggattgtaaacgcaccaatcagcgccctgacaaaacaggccactcggctctaccaatcagcgggatgtgggtggggccagataagagaataaaagcaggctgcccgagccagcattgccaacctgctgaggtcctcttacgcgccatggaagctttgttcttttgctttttgccataaatcttactactgcttagtttttgtgtctacggtgtttttaaaagctgtaacactcgccgagaaggtctgcaactttcactcctgagcccagcgagaccacaaggccgtcgggaggaatgaacaactccagatgcgctgccgtaagaactgttaacactcaccgtgaaggtctgtagcttcacttctgagccagcgtagaccatgaacccaccagaaggaagaaactcccaacacatctgaacatcagacaggacagactccagacacgcctctttaagagctgtaacactcacagcgagggtttgcagcttcgttcttgaagtcagtgagaccaggaacccaccagttctggacacgtgcccaccgtggcctcaaagtgctgggattacaggcatgagccactgcaccctgtcgcttttttttaaatgtcactccctgatcctaagtagtgtaagacctcagatgaacgaatgtaactgccattgactaaagaactctagttggacaggcgttttagctgttgtccttaaaagatggcctttggttgacattcgttccaaaagcatgatgaaacactgaaaacttgtgtggttcctttgtcccaggaaagggaagatggcaagggcttatatctcgtttggcaaggagttcacagtttccctgcaagccccagaaggtgggtggtaacaatgggatgtgtttggctcctcatcctcctgctgacagccaggtctcagagaggcaagtcccacacttcccaagctctggatccgagcttcgctgccgcagaaggaaagtctaactagttaggaagcacagaacttgcctggccttcaccagcataatcagatctgtcattctcttcaggaactggctctgctctaggccttgttctttgctctggaggtaacaattgccatttttctttggtatttctgctgtagtgatcatacttgcccttctcataggaaatcatgggaatcagccccagtcacagctggctcccagatggctcttgatcctgtgaccccaccaacattccaatgcgatttgcttgggaggttcaaacttggcttgctggggcaccattcttctggaaccccaccctgggagatttataggcaggccttggagagaacaaatctctagaggtgggatggggccaagcagtttccttgtgttgcatgttctagaattctgcctaaaacaaaagaggctgacctcattcttgccccacccgaagattgagcgggaataactaactagcaagctattactgacattgctaaattacctaacaaagttctttctgtctctgtctctgtctctcttgatatatactaatatatgtgtatgtatactatatatataagagaattcttcatatatatgtgcatacataagaggaattctcttccagtgtgtgttcttgcagtaggatgctaagtttgacataaaaatgatctaagaagattgtattctccaggtcccaggctgagagtatccaacctgttcaggtagaaatggccagtagagctcagatagtttctcattacaaagaaattctttggtgtccatttcctggagatactgtggaggatgctagcaggtttctaacatacttcagctgttcaggaaatactttaaataatttcctgctgtagagagtaggaggagggcctgaaacttggaatgcattactctctttatggtctcaaatgtggttcacaaggacccttcgctgttcacacacacgctccgaggcgttcttttctgcctctaccagcctttttatgtgggaatgttcgttttctaagtgtggcgagaatcctactaacttggacttcccatagcatgctggcctgagcttcctaaggaactctacaaacatgagctaattaagcttggaaagccccatgccagtcctcccggctattattgaaatgaggccagctctgaggtggaccagctgcagtttttgcccggcagcaacaattcaaacagtggagaggaagggaagctggctgcctaacgcaattgaaactgcaagggagaagcaagttaggcaacacgtaattcattgcctccttggtttgcttcagcgtaacagtggggctcagatactggcattttaactgggtcagttaggcctttgtccaggatttcaggcaatggcccaaaaatggacaagtctaagattttgctttttttttttttttttaattgaggtggagttttgcctttgttgcccaggctgggtgcaatggcgccatctcagctcactgcaacctccacctcccaggttcaagtgattctcctgcctcagcctcccaagtagctgggattacaggcacgtgccaccacacccagctaattttgtatttttagtagagtcagggtttcaccatgttggtcaggctggtctcgaactcctgacctcaaatgatccacccacctcggcctcccaaagtgctgggattacaggcgtgagccaccgagcctggcctaagattttgcttttatctaaagcagtggttctcagtcgagggagatattgccccccaagatgacaattgacaaattctgtagacttttttttttttttttttttttttttgcgacggagtttcgctcttgttgcccaggctggagtgcaatggcatggtctcagctcgctgcaacctccacctcgtgggttcaagcgattctcttgcctcagcctcccgagtagctgggattacaggtgcctgccaccacatatggatactttttgtatttttagtagagatggggttttgccatgttggccaggcggtcttgaactccttggcctcccaaagtgctgggattacaggcgtgagccaccacgcccagccaacaatttacttttaaaaggtaaaagtaaagctggtgacaatgaaaagggcatgtctttgcccttttctgcctaagagattaaaacgtggacaacatgcaatagccttcaactctggtctccctgccttctcttcctctgttgtaccacaccagtcctcacaaccaccacagggtgtgtgcgtgtgtgttttatgaaccttgttcacccttacaacaacttattctcctagattcctccctttctattgtctttattataataaggtacaactttttaatttaatttttttttgagacgagtcttgttctgtcgaccacgttggagtgcagtggtgcgatatcagcacgctgcaacttccacctcccaggttcaagggattatcctgcctcagcctcccaagtagctgggactacaggtgcccgacaccatgcctgactaatttttgcatttttagtagagacgggatttcaccatgttggccaggctggactcgaacttctgacctcaggtgatccgcccatcttggcttcccaaagtgttgagattacaggcgtgagacaccacacctggccttatgtgcaatttgtattcagtaatgagtgtgaagtgctgtaatctgaagcgtgccgctcaatgcttttttttttttcccagacaaggtctcactctgtcatccaggctggagttcagtggtgcaatcttggctcactgcaacctctgcctcccggcttcaagtgattcttgtgcctcagcctcatgagtatgtgggattacaggcccaagtcacaatgcccagctaatttttgtatttttagtagagattgggtttcgccatattgctcaggctggtcttgaactcctggactcaagtgaccctcctgcctcagtctcccaaagtgctgggattacaggagtgagccactgtacccagccactcaatgcatttttacctacatggacacccaggtaaccaccatccagataaagacatggaacatttcagctgagtgcggtggctcactcctataatcccagcactttgagaggccaaagcaggaggattgcttgagtccaggagttcaagaccagcctgggcaacatgacaaaaccccgtctctacaaaatacaaaaattagccaggcgtggtggtgtgcacctgtagtcccagctacttgggaggctgaggtgggaggatcgcttgagccagggaggtcaaggctgcagtgagctgagattgcaccactggactccagcctgggtgatacagtgagactctatctcaaaaaaagaaaaagaaaactaatgtgcctcctttatctaaaacaccaatattaagaacaacgatatttctaaaaattcagagctaggtgtcaaaatgaattcaccccagagtgcaccaggcatcgtcagattctcttcactagattcaacccccagggctcctaagtggcttccaacctgtgctgtggatggacagtgagtgaatgcttttggctttacataggaacggtgaggaccgggtgcggtggctcacgcctgtaatcccagcactttggaaggctgaggtgggcagatcacctgaggtcaggagttcgtgaccagcctgatcaacatggcgaaaccctatctctactaaaaatacaaaaagtagccagacatggtggcaggggcctgtaatcccagctacttgggaggctgaggcaggagaatcacttgaacctgcgaggcggaggttgcagtgagctgagaccatgccattacactccagcctgggcaacaagagagaaactccgtctcaaaaaacaaacaaacgaacaaaaaatgggaagggtgagaacaaatgtttttccttctaatagtttagaaagacagaaagtggaagttattggttcacacacacacacacatcaacaaagtatttgttttctcatggtgtgccaagattttatgcatgtcaaaaatatgaacacagggcatagggtttgctatgaaaagcaacagggggagactgagttctgtgtgttgtgggcgagggaggtatagtatttgtgaaagctgaagactccctcctgactggaaaaccgccacagggaggcagtagagcttagtggcaaatagcattggctctggaatcagatttgaatttcaatccagctctgacacctaatagctgtgtgacgtccagcaagttgcttaactgctctgtgcctcacttttcaactcagcaaaatgaggataaaactagtatctaactcctaccagtgctttaaaggtgatttgaatacgcagctcaacaagtaagctctcagtcagtgttagtttacaaagcaggagtttaagggggcaactaatttcatttcagatagatagatagatagatagatgatagatagatagatggatcttggataaatagattttttttgagagcataatatttttcaagctgtgccaaatggtttaacccaaaatctaaacagttgctcaaacagcctttttccagcctccacctacaatcatgtccccttctgatcatagagcagatttcaacagctccttcagagaaaccaggccctccacaatgttattcttctacctctttcttgtcatgcaaaggatgtataatttgttccatttcactctctctctctttctttttctttcttttttttttttttttgagacagggtctcagttcgttacccagactggagtgcagtggagcaatcatggtttaatacagcctccacctcctgcccttagcaatcctcccacctcagcctaccgagtagctgggactacaggtgtgcaccaccatagctggctaatttttatatttttttgtagagacagggtctcattatgttgcccaggctggtcttggtcttgaacttctggcctcaagcaatcctcctgcctcagcctcccaaagtgttgggattacaggcgtgagccactgagcccagccccatttcactcttgagtgtggaaaactttcttttagcctttggggtgactatagatagacagatggagatagatagatagatgatggaaatttagaatacataatacctatatattccaaatatatctaatatatatgcatatgataaatacattatgatatattatcattacttatacaatttattttgggtattctacttggagttttacctacaatttcaccgagattaggagatctgcttttttctgctctttttcatgttcaaagtttcaaagtaagagcttaatgtgaaagctcccaatgttgcgtgtccattaattacactgagtgtctaagcttgggagagggggagtagtaagctcttggctggtggttaaacaggttattggaggcatgtaggggattgataacatttctggaggaggaaggggtgagttggatgtgtagggatcccactgatcagatgggaggaatttagatttaatccctgattggattgtagttcaccagctgggactgcaggctggtttatagcagtggattccatgttgatggaatatcagactccttgcttctgaaaggagtgagagaaactgcatgaaggggctgggcgtggtggctcatgcctgtaatcccagcactttgggaggctgagacaggcagatcgcctgaggtcaggagtttgagaccagcctgaccaacacagtaaaacccatacaaaaaagtattcaggcgtggtggcaggcacctgtagtcccagctacttgggaggctgaggcaggagaatcgcttgaacctgggaggcagaggttgcagtgagccgagatcgtgccactgcactccagcctgggcaacaagagcaaaactgcatctcaaaacaaaaaagtcatttttacagatgagaaaactgaggcacaatgaggtcaaatgatttgccaaggtgtaaccagtttgtctaatttcaccttctccgaaggaccaaggcggatggtgtcccgggcttttgctttgtaggggctcctggacaagggcttttttttttttttttgagacagagtctctctctgtctcccaggctggagtgcagtggcacgatcttggctcactgtaacctcctgggttcaggcaattctcctgcctcagcctctcaagtagctgggactacaggcatgcaccaccacacggggccaatttttgtatttttagtagacacggggtttcaccatattggccaggctggttttgagcccctgaccttgtgatccgcccgcctcgacctcccaaagtgctgggattagaggtgtgagccatcaagcccagccggccaagggcttttgacagcggacaagtgggcccacggaagcggactccccaggaacaccctggagggcgctggaggagagcaagctggttgcatgtggcaaaggggcaacgtccttttctgtaagtttggggacagcaagaggtgagttcagggtaggaagctgaggtctctacaaggtgctggccaggatgtgggcctcagggctctctccagaatgaatctgctcgctgctgtctgctgccgatttatttatttatgaggcagagtctcgctctgtcgcccaggctggagtgcagtggcacgatcatggctcactgaaacctctgtctcctgggctcaagtgatcctcctgcctcagcctcccagatagctgggactacaggtgtgtgccaccatgctcagctaattaaaaatttttttttgtagagattgggtttcactatattgtccaggctggtctcaaactcctgggctcaagtgatccccctgccttggcctcccaaagtgctgggataacaggtgtgagctgttgtgcctggccatggtgccacttactgaagaggaaagaactaacgctgagcagagaaagggctgtacccaggtggttttgaaaggtgctttcctggtgtgtttcacctccacccaacaactattctttgagcctttaatatgggcctgggaaggaaaatagtatttaccacaaaccatacccttctctgatatgcattacccctccgaattctcacaaatacctgagaggcagggcaagaattctgcttttacagaagaaggagctgaggctaagagaggttaaggaagctatttagtgtcacacagccaccaaataacaaaactggaaagtcatctgtggtctgcctgccacttgcctcgaattgccagggatagtactaattgctggaatacaaatcctagaggaaagccttcttttcctaaaactttttttttagacagagtcttgctctgtcacccaggctggagtgcagtggtgtgatcttggatcactgtaacctccacctcccaggttcaagtgatcctcctgcctcagcctcctaagtagctgggactacaggcacacaccaccatgcccaattaatttttgtatttttagtacagacaaagtttcaccatgttggccaggatggtcttgaactcctgacctcaggtgttccacctgccttggcctcccaaagtgctgggattataggtgtaaaccactacgcctggcctagaggaaagtctttttctcctaaaaatctttttgagacaaaatctcgctctgtcacctaggctggagtgcagtggcacgatcttgactcactgcaacctctgcctcccgagttcaagtgatcctcctacctcagcctcccaagtagctggggctacaggctaactttaaatacccaatagacgagagaaggctggagtccaaatgaccggtaggaatggtggacgctgattgcgagctttttggcactgtggctgggcccgatactcagtaactctagtaggccaaccatgaccccttaaggaggaactgttgtttccattttatagcaggggaaactgaggctcatagaagttaagaaagttgttccagatcctacagcaagccattgtctcttcccagccaagggagacattacacgaagcacaaacaagccctgtgggtggacatggtgacatttggcacgtgtgcagtctcagtctcgttcaagggcctgaaatgagtcatctacaaatcaaagaaccagcctctccggacacagaatgaggctggtttgtacattaggaggagctggacccagataatgtggttccaagcagagaagatagccttattccaattgcgtcccctctgcaagcccttgggagctgcccaggcccagtgacccatggaagagaggatgctgtgccctagtgtccaagcagcacggcttggctcagtccactgggcttcttccagctcacgaacctgtttgtttttacccttcaatgtgaaccagatgtgggcaccttgctctccaggaggtccctcacccgtaccccccctaccaggcatcattggcagccacagctgatggaccagcctcctccctgctctccggcctctctcacccccatagcccctccctcactgcacctcctgcaccttcccttcccccagcacgatttgaaacaggaaatgacactgggcagatctcaaaagtccatatgtcctggacactctctctaggaatttcctgggcctccagcttgctctgtgtcatgtccttcccactcacagtatctggggggaaagaagtgctaaaggaaaatgagagtgagcatccctcgtccccagtgctatcttatcccattgtgatcttgggcaagtgatttatctatgtctgcatggactcatgaatgcaataggttataatccatgactctcactattcactgtaataattaaattattcccaggccgggcacagtggctcatgcatgtaatcccagcactttgggaggctgaggcgggtggatcacttgaggtcaggagtttgagaccagcgtggccaacatggtgagaccccgtctctactaaaaatacaaaaattagccaggtgtggtggcacacacctgtagtcccagctactctggaggctgaggcaggagaatccattgaacctgggaggcagaggttgcagtgagctgagattgcaccactgcactccagcctgggcaacagagtgagactccatctcaaaaataataataataataataataataataattcccagtttggccagtgggaacccactcaagctcgcagctgtgcccttttttggtgacccatcattctttgagctttttagtacaagctgttatagaagcatccgtatgttttttgtcctagccctggaatcagtctgttctccaaagatcctggttctcctttttgaaaatggtatttagaagtcaagatctggatgctacatgtgctcattgccactaggatgaggctgttccttgtccctctcagtggatacagctggggaatgtagatgtgtacacacacatgcacacgcacatatacaatcagtcacatctgtgttgatttctttattattttaagaaattgtgagttgggtgcagtggctcacacctgtaatcccagcactttgggaggccgagttgggcagatcacctgaagtcaggagttcgagaccagcctggccaacatggtgaaaccctgtctctactaaaaatacaaaaattagccgggcatgatggtgggtgcctgtaatcccagccgctcggcaggctgaggcaggagaatcgcttgaacttgggagatggaggttgcagtgagccaagattgcaccattgcactccagcctgagcaacagagcgagactctgtcttaaaaaaaaaagagagagagagaaaagaaagtgtggtaaaatacatataatataaaattttaactatttttatttggcaatcttaactgtttttatttttatttaacttttatttttattttttgagacggagtctcactctgtcacccaggctggagtgcagcgatgcgatctcagctcatggcaatctccacctcccaggctcaagcaatcctcccacctcagcctcccaagtagctgggactacaggtgcaccccaccatgcctggctagttttgcattttttcaccgtgttggccaagctggtcttgaactcctgacctcaggtgatccacctgcttcagcctcctaaagtgctgggattatgggtgtcagcctctgtaccctgccccatcatttttattttattatttattgtttattattattattattttaagatggagtctcgctcttgtcgcccaggctggagtgcaatggcacaatctccactcactgtaacctctgcctccctggttcaagttattctcttgcctcagcctcccaagtagctgggattacaggcgcgtgccaccatgcctggctaattttttgtatttttagtagagatgaggtttcaccatgttggccaggctggtttcaaactctcagccctcagtgatctgcccacctcagccttccaaagtgctggaatgacaggggtgagccactgagcccggctgttttgttttttggttttttttttttgagaaggagtctcgctttgtcacccaagctggacttcagtggcacgatctcggctcattgcaacctctgtttcccaggttcaagtgattcgcttgcctcagcctcctgagtagtgggattacaggtgcgtgccactaggcccagctaacttttgtatttttagtagaggcggggtttcaccatgttggccaggctggtctcaaactcctgacctcaaatgacccacccatcttggcctcccagagtgctgggattacaggtgtgagccaccttgcctggcctagatccatgatttttcaactggactacacactttcttcaggtctcagcagttatcttactaataatggcctctttcccttcctggacctaatccaggacaccgtggtgcgttgagtgtccatgtctccttagtctctgctgactggtgacagtttctggtcttctcatgattagactgggactgcagaattttgggaagaatacctaagagatgaagtgccctcatcctatcacatccgggatgtgtgatatcaacatatatgagtcatgttggaaagatggacaaatggggcttccaaagctgttcatcacagtcagcgaatggatttgaactggggccattctgagatgtgtgctcgtttccttagtttgagaaaaagaactgtctggtgaggaaaacaaggaaagacttccggtactgaagcaacggtgggaggtagaagtctgcacccagatgaggtccttcaggtggggtggatttgccacctgtggcctctttcccaggaccttgtccagtcttgtcttagcttctctctgtctggtgcaagtggcactatcttttatccattacatgggattgtctggtctttgtgccactagtgcaaagatgaaaataatctaataatccatcaaaaatgcatgtttcatgagaattcaagttatacaagagtcttatactatgccaaccagcagtcataggtcatttgtaccctcctccctgccctccctgcaaccctgccttcagagctcttaccagttcttggagcccctcccagtgggatgccagcagaggaggccatccacatggaattggcttatggctgttggtgacactggctttcctttacctgcttgtggacacctttgtctcgtagtcatcaggaaaatcactgtcactgcatcagaaacgctggaacatcctgaagtttcaaagcagaaattccaaaccatgtcctctgggcagtattcaacaagcatatgtgtttcatttggccctcacttaatttaaaaagcttaaaattagtccacaacatgaaaaaatcaggagctcatcataaaagactggcttttggcttcttttgaaaaatcagatgtggtaatagatggcccacattcccacctggcagcatgagggcaagcggagtggcagctgccccggtggctcgggcacatatccccactccacccctgtcctctccactccccacgaatcaccacccccaacctcattcattggtggtgtctgcctggcctctgaaagtgtttgagcccacagcccttgcatgagattcttgcagttcattcattcactcagcaaacgcttactgcgcttctacccaggccaagttctgtgagaggctcccgcatcaacaaatgatacattggtgattctagagccacacactaggtccttgattaagggaaatcctgctgatgtgggagtgtggatgatgggtccgcagctcagcctggagggagtcaggggaggcatcccagagacacacacccttgggaagttggttgccatctaaatttttttttttttttcttgagacagagactcactctgtcgcccaggttggggtgcaatggagcgatcttggctcactgcaaactccgtctcccgggttcaagggattctcctgcctcaacctcctgagtagctgggactacagatgcgtgccaccacatttggctagtttttttggtagagacggggttttgccatattggccaggctggtctcaaattcctaacctcaggtgatccacccgtcttggtttcctaaattgctgggattacaggcgtgagccatcatacccggcctgccgtctaaattcaagtgaggtataaaaaggaccctgaccttgggctgagccatctgtctctctggacttgacctggagtttgctctccaatgcctcatctctgtgctaattttgatggcctcttcacagagcaggactttctgtgtttgtccagggagtgcagaaaacacagtgcaggacactcagctgtggtgcgaggcaacatcagggctagaaagatctgtcatgggcagcatggaggccccattcttggagcttgtgtgtatgttagcaggcaacatgagaaagggccaaagccttggagtcaggtagactaggtttagatccggttttgccatttattggctatgtgactgggtggtgattacactctcagtgtttccttgactataaagttggggatatagtgtttattcctaaggtgactgtctggtttgcttttgtttttatttttattttttgagacagaatcttactctgttgcccaggctagagtgcagtgactcaatgttggctcactgcagccttgacctcccaggctcaagcaatcctcccacctcagcttcctgagtagctgggactacaggcacacaccatatatatatatatatatttttttttttttttctgtagaaacaaggtctcactatggcccagtttgctctcgaacccctgtactcaagcgatctgcttgccttggcctcccaaattgcttggattacaggtgtgagccaccgcacttggccagttactgtcaatgttgcgtgtaatatgtgtaaagtcccaaaagcagtgttgggaacgtaatagatatataccaaagagacactcatctttttcttttggtatataattctatgaaaaaaatttttttgagacagcctggagagaagtggcacaatcatagctcactataacctcaaactcatggtctcaagtgatcctttcactttggcctcttaaagtgctgggattacaggccactgagcctggacaagttttatgaaattttatcacatgcatagattcaagtaaccatccccacaataagaatacagaagtattccatcaccactaagaaatttcttcctggggctgggcatggtgcctcatgcctgtaatcctagcactttgggatgccgaagcaggtggatcactggagctcagaagtttgagaccagcctgggcaacatggtgaaacctcatctctacaaaaaatacaaaaattagctgagcgtgcagatggcacactcctcctgcagtcccagctatgagggaggctggtgtgggaggactgcttgagcccaggagacagaggtctcagtgagctgagatcgtgccactgcactccagcctgggcgacagagcgagactctgtctcaaaaaaaaaaaaaagaagaaatttattcctgttacccctcagtcacattcttcctccaactgtaacccctggaactgctgatctattctccaactctataactttgtcacttcaagaatgttatataaggccaggtacagtggctcatgcctgtaatcccagcactttgggagaccaaggcaggcagatcacttgaggtcaagagttcaagaccagcctggctaacgtgttgaaaccctgtctctactaaaaatacaaaaattagccgggcatggtggtgcacacctgtaataccagctacgcaggaggccggggccctagaatcacctgaaccagggaggcagtggttgcagtgagctgagatggtgccgctgtactccagcctgggctacagagcgagactccatctcaaaacataacataacaaaacaaaacaaaatgttggctgggcacattggctcacgcctgtaatactagcactttgggaggctgaggcaggtggatcacgaggtcaagagatcgagaccatcctggccaacatggtgaaaccccgtctctattaaaaatacaaaaattaactgggcgtggtggtggacgcctgtaatcccagctactcgggtggctgagacaggagaatcgcttgaacccaggagatggaggttgcagtgagccgagatcatgtcactgcactccagcctgggtgacagagcaagagtccgtctcaaaaaaaaagaaaaaaaaaaagagtgttatataaatggaatcagacggtgtgtggccttttgagattggctttttccactcagcaaaaagccctgagacccatccacattgttgcatggatcaatcgctcattaccttttattgctgagttacttcactgaatggatagaccatcatgtgtttatctgtttacttgttgagggacatttggcttgtttccagtttttggcttgtgatggttaattttatgtgtcaacttcactgggctatggggtgccctgacagttgatcaaacagtattctgggtgtttctgtgagggtgattttgggtgagtttaacatctaagtcaatagactgaataaagccgactgccctccctaaggtgggtgggcctcatccaatcagttgaaggcctgaatagaacaaatagactatctttcctgaataacagagaattcctcctgcctgactgcttttgagctgagacaacagtttttttcctgcctttggactggaaccgaaacatctgttcttcctgggtatccagcctgctggccttggcactggaacaacaccatcgatcctccttggtcttcagcttggctgactgcacatcttaggatctgtcaacctccataatcacgtgagccaattctttgtagtaaatgtatatattatatatatatgatttattatatacatatcatttatttatatagatcaatatatatcatttcttatccctatgtctttttttttttttttttgaggcaggttcttgctctgtcaccaaggcttgagtacaatggtgtggtcatggcctcactgcagcctcaacctcctgggctcaagcaatgctcccacctcagtctcctgagtagctgggaccacaggtgtgcgccagcacacctggacaatttcttttttttgagctagggtctcactttgccacccaggctggagtgcagtggcatgatcttggctcactgcaacattcacctccccggttcaagaaattctccagccttagcctcctgagtagctgagaccacaggcatgtggcaccgtgcctggctaatttttgtgttttttgtagagatggagtttcaccatgttgcccaggctagtcttgatctcctgagctcaaagcaatctgctaccttggccacccaaagtgctaggattacaggcatgagccaccgtgcctggctcaacctggctaattaaaaaaaaaattttttttttttgtagagacagggtctcactatgttgctcaggtggcctcaaactcctgggctcaagtgatcctcctgacttggcctcccaaagtactgggtgagccaccatgcctggcaatgatttattatagatagatatatcctataggttctatttctttggagatccctgagagatagtgttgtaaccaagcgagttatagagaaacgccacactttgagacaaattatggagtcctttattagccggcgactgagagacagctagcactcaaaattctctcagccccgaagaaggggctagattctcttttatactatggtctaaataggggagggggagtttaactgaagcagttttacagaagcagaacaggcaaaaagttaaaaaattaattggttatagaagcagttgtaaaagataaacagttccaggtgcaggggcttaaactatcactaagagataaatgcaggggcttttagataccttccaccgagcacattcccaggagctgctggtacagcctgcctcaatatcttatcagcaggtgcattactggatgtgcttagagtcagcttgcactagttattcccttaagggggataaagggggctgtgaatgaagaaactaaaatggagtctgtctggctctctctgctaggagagagtcactcaggttaaaacaaggtaggttatcacaatatatgtatgtgtttgtgtatatatatataacttcttatatatatcatttatatatatgatttattatgtatatatctctcttctattggtcctgtttccttggagaatcctgattgatacatgactattacaaataaagctgttataattatttgtgtacaatattttatatgaacataaattttcatttctctgggagggtgattgctgggtcttgtggtaagcgtacgtttaactttataagaaactgccaactgttttctagaatggcagtaccattttgcatccactcctcattttaactattttgttctatgagttaaatgtgttaacttcagcatgggctgacattcgaaggctggtcatgcagggatctttgcttacttgaattataatcaccactgcgacacacatccttgttttaactttcacatatgtaagccaagcacagaggtctgaaggtttagagatttgaaataacaaacctggctgcctcagattttcttggctggcaccaggccttgccagacctttgaattggctgggtgcagggaagggtcaccaggaaactcaggctgcccggaccgacaggaagcatgggacgaagcttactccgggtctggctcgtggtcagcctggctggggtctgaggcttccaggccggaacagtgtgcatggtcaggaaacagcctggactcttgaaatcaccccacccctgaaaaatgaattcatgaacagagacgctcccagctcctttttttgagaaatagcatcttttagcctggaataaaatcaatttgcagagctgctatgactccgtgttcctcgggctctgcgcacctctgcatcagtggcaagtggctttgggacttattttcctggagaaggtggctgtggagttttcttttcttttaatttttaattaaccttttgttgttgttgttttagagacgggagagtctcactatgttgccaaggctggtcttgaactcctggcctcaagcgatcctcctgcctcagcctttcgaaaagctgggatcacaggagtgagtcacggtgcctggctctagagttgtttactgatgctttatatatatataaaatatatatgatatattatatataaaatatataatatataatatacaaaatatataatatataatatataaaatatataatatatcatatacaaaatatataatatacaaaatatataatatataaaatatatattacataatatataaaatatacgttacataatatataaaatatacgttacataatatataaaatatacgttacataatatataaaatatacgttatataatacataaaatatatgttatataatacataaaatatatattatataacataaaatatatattatataatatataaaatatatattatataatgtataaaatatatattatatatagtataaaatatatattatataatgtataaaatatatattatatatagtataaaatatatattatatataatataaaatatatattatatataatatataaaatatatattatatataatataaaatatatattatataaaaatatattatataaaatatatattatatattgtatataaaatatatattatatattgtatataaaatatatattatgtattgtatataaaatatacataatatatataaaatatatataataaatatataatatataatatatacaaaatatatataataaatatatattacgtattatatataatatatatataatatatatattatatataattaatatatattatatatatataaaatatataaatatatatatatataaatatatatatatatatatatataatatatatattatatataatataaaatatgtataataaatatatattatatataaaagatataatatatatattatatataatatatataaaatataaatatataatatatataaaatataaatatataatatatataaaatataaatatataatatataatatataataaatatatattatatataataaatatatattatatattatatgtaataaatatatataacatataatatatataatatatattatatataataaatttatatataatatatattatatataataaatttatatataatatatattatatatattaaatataaaatatatatatataaatatatatatattatatataatatatataaaaatatataataaatatatattatatataatataaaatatgtataataaatatatattatatataaaatatataatatatatattatatataatatatataaaatataaatatataatatatataaaatataaatatataatatatataaaatataaatatataatatataatatataataaatatatattatatataataaatatatattatatatatatatataatatatattaaatattaattatataatatatataaaatataaaattatataatatatataaaatataaaatatataatatataatatataataaatatatattatatataataaatatatattatatattatatgtaataaatatatataacatataatatatataatatatattatatataataaatttatatataatatatattatatataataaatttatatataatatatattatatatattaaatataaaatatatatatataaatatatatatatttgagacagagtcttgctctgttgcccaggctggagtgcagtggtgcaatctcggctcactgcaagctatgcctcctgggttcacgccattctcctccctcagcctcccaagtagctgggaccacaggcgcccgccaccacgcctggctaattttttgtatttttagtagagatgatatttcaccatgttagccaggatgatctcaatctcctgaccttgtgatctgcccgcctcagcctcccaaagtgctgggattacaggcatgagccactgcgcccggcctactgatgcttaatattatgactttctcctttccaccctccctgcacccctcaccccacgttaacaggtacaaatatatgtatatatataaaatatatatatctttatattatatttatatgtttttttatagagatggggtcttgctatgttgcccaggttgttctcaaactcccagcctcaagtgatcctcctgccttcgcctcccaaaatgctaggataacagtgggagccaccacacccagcccatattttttatcttgtttatggttattattacctaacagtataaggtttctgaacatactgcatttgggtactgttttgataaatagattcaattagacatcacaatggtatggacctttctagttttacattatctcacctgaggcaggtgaactgttaactccatgttatccagaatttcccagggctagaacccatagattcagagcttttctatttttttttttttttgagacagggtctcactcccatcacccagactggagttcagtgatgcaatcttggatcacttcagccttgacttttaggggttcaatgatcctcccacctcagcctctggggtagctgggactgtaggcgtgtgtcaccatgcccggataatttttttttttttttttcagtagagacagggtttcgaccatgttgcccaggctggtcttgaattcctggactcaagcgtcaagctggccgggcgcggtggctcacgcctgtaatcccagcactttgtgaggctgaggtgggtggatcatgaggtcaagtgatcgagaccattctggccaacatggtgaaactctgtctctactaaaaatacaaaaattagctgggcgtggtggtgcgcacctgtagtctcagctactcagggggaggctgaggcaggagaatcccttgaacctgggaggcggaggttgcagtgagccaagatcgtgccactgcactccagcctggcaacagagcgagactcttgtctaaaaaaaaaaaaaaaaaaaaaaaaagcctcaagctatccatccatcttggcgtcccaaagagttgggattacaggtgtgagccatgacacctagcttagattcataactattaaggcagtctccaaagctcccatggctacaagtggttgatcaggagctggaagcggggggactgtctggttctgtgccttactgtcattctagtgtggagctgtccgatgtgaaagccactagatgcatctggcagggggcacgtgatatggctggtccatattgagatgtgtgggaagtgcaaaatccacatggtaagacttggtatacaaaggataatgaatgtagggtatctcattaatatatttttatacagatgttcctcaacttatgatgaggttatattctgataaatccattattaaagtcaaaaaaaatcctttaatggaaccatggttaaattggggaccatctgtattatttacatgctgaaatgatattttggatttgttgggttaaatattttataaaaatgaataatcccatctgtctttttttttttttttttttttttttgattcagagtttcactcttgttgcccaggctggagtgcaacggcttgatcttggctcactgcaacctctgcctcctgcgttcaagcgattctcctgcctcagcctcctgagtagctgggattacaggccctgccaccatgcccgggtaatttttgtatttttagtagagatggggtttctccatgttggccaggctggtcttgaactcctgacctcaggtgatccacccacctcggcctcccaatgtgctgggattacaggtgtgagccacttcgcccagtcccccatctgcctgcttccctccatccctccctcccttccttccctccgtttctctctctctctttctcagggtcttactctgttgcctcggttggagtacactggcatgataagggctcactgcagctttgatttcccaggctcaagtgatcctcccacctcagcctcccaaagtgcagggatcacaggtatgagccactgcacccggcctcatatttttatttacaaatattttagacatttgaaatactacagcattcagatctgcttacaaaatgaatgaaaatgactgcttatcaagaaactactatgactttgtgacatgactatagcagtcttataagtaaatttggagtagttaagcagatctaaaatatggagtaacacttaggctggccgtggtggctcacaactgtaatcccagcacttgcagaggccaaggtgagtggatcacttgaggccaggagttcaagaccagcctggccaacatggtgaaaccctgtctctactaaaaatacaaacaaaaaaattaggcaggtgtggtggtacatgcctgtagtcccaactactcaggaggctgagtcatgagaatcgcttgagcctgggaggcagaagctgcagtgagccgagatcatgccactgcactccagcctgggcgacagagcaagactctgtctcaaaaaataaaataaaataaaataaaataataaaataaaatatggaataacattttaaaccatcatatgccactccaaagctcacttgtttcctacaattaaacatttgcttggctataggagacagggacaaacattcttgatgaccacactgcagcctataaaactggatttctgacactgggctccagcttcatttcctcagggtctttgtaggagggcaagcatttgaacagtgtccagctcacactcccactatactgtcctgaaccttctcctaggggcaaatggtggaggcgatatagaaatgggcagagcaggccacaaacttcaacataagattctcaatgtgtgtgtgtgtgtttttaattgaggtataattgacatgccataaaattaacccttgtaaagtgtacaattcagtacttttactgtattcacagagttatgcaactatcaccactatctaatttcagaagatttcttcattccctaaaagaaactgagcatctattagcagtcactccccactgatcccttcctccccagccctaggcaactgctcatctactctctgtgtctatggacttgcctactctgcacattttatatacatggaatcatactctctgttgtcctttgtgtctggcttatttcatttagtgtgttttcaaagtttatccctgttgtagcatggatcagtacttcattcctttttattgccaagcaacattccaatgtatggagataccacatttgtttatccatttgtcagttgaagagcatttgggttatatccactttttggcttttatgaataatgctgccatgaacatttgtgtacaattttttgtgtaaatgtatgtttgcagttctcttagatgaatagccagaagtggaatttctgggtcataaggtgatatagggcaactctgtgtttaagactttgagaaagccatcaacatggtgaacccgtctccaccaaaaaaaaaaaaaaacaaaaaaacacccaaaaaacaaacaaacaaacaaaaaaaacttggccaggcgtggtggcttacgcttgtaatcccaacactttgggaggccgaggagggtggatcacctgaggtcaggagtttgagaccagcctgaccaacctggataaaccccatctctactaaaaatacaaaaattagctgggcgtggtggtgggtgcctgtaatcccagctactcaggaggctgaggcaggagaattgcttgaacccaggaggtggaggttgcggtgagccaagattgcaccattgctcttcagcctgggcaacaagagtgaaattccatctccaaacaaaacaaaacaaaaaaacaaaacccaaaaaagtagcaaggtgtggtggtgcgtgcctgtagtcccagctatgcaggaggctgaggtgggaggattgcttgtgcctgggaggcagagattgcagagagccgggatcgtgccactgcactccagcctgggtgacagagcgagactcagtctgaaaacaaaacaaaacaaaacaaaaacttcagcatgctttcaaatttgtttttgaaatttatccatagtgatatatgtggctctcgttctttttttttcaactgtatgcaacttgtttctctggccttctgttgatgaatatttgagttgttttgcagttttttactagtacagacagagttacaatgggcattgttgtttactccgtttcgggcaagtgtgtgagcttatggtgtatatccggaagcagaactggtggactgaaggatttgttcaccactgattttactagctatggccaaattgttcttcaaagtgactgtagtaatttacactctggccagcagtgtgtgtgagttcccatttttgcgtgtccttgccaacacttgccattgtcagtccttcaagctcttgccaagctgagggatacaaagtggtctttccgggttgttttaagtttcatttccctgttaatgagtttggaggctcttttcacatgcccttgaccattctgtgagtttccttttaatatcctttgcccattttccacttgggttgtttgttattttcttcttgattttataggagtttaaaacaaattttctgaaaatgaatcttaaagtctgtggctttattttcactgttgttatggcttttaaattctccttcttgtttcctttatttcttttggtaagaagtttctaaaataattttatagtctatcctttttgtgtcttatttgagaaactcttttgtattctgctataaacaaaatcccttatatattttttctacccattttggagttttgcctccacatttaggtcttcaattcacctataatttgtttttgtgtatgctatgaagtaaggatcaaactattttctcccatttgggtaactaattaggccagcaccactatcttcttttcactgatctgtaatgtcttctctgccatatattattttcatatggcatgggtcattttctggttatattttgttccactgggttctttgtttctccctgcacaaatactacacttttttttttctttacactggatctggctctgttgcccaggctggagtgcaatggcaccatcatggctcactgcagcctctgcggacctcctggcttaaggagtccttccacctcagcctcagcctcagcctcccaagtagctgggattacaggtgcacaccaccacgcctggctaattttttggtttagtagaggtttcatcatgttggccaggctggtctcaaactcctggcctcaagtgatttgcccgcctcagcctcccaaagtgctaggattacaggcgtgagccactgcacccagctggatttattcttaagccttttataacttttgttgctattgtaaatgggattttttgtttttgtttttgtctgagatggagtcttgctctgttgcccaggctggtgttcagtggtgcgatctcagctcactgcaacctctgcctcctgggttcaagtgattctcctgcctcaccctcctgagtagctgggattacaggcgcccgccaccacgcctgcctaatttttgtatttttagtagagacagggtttcaccatgctggccaggctagtctcgaactcctgacgtcaagtgatccacctaccttggtctcccaaagtgctgggattacaggcatgagccaccgcgcccggcctggccctccaatgttaaatagaaatggtgacaatgggctttcattctttgtttctgctcttaaagagaaggcttctacatttccattattatttctcctgcgtgttttgatagaaaatgttcatcatgttaaggaagttggcagctagtctagtttcctacgaatttgttattactgtttgtttgtttgtttgtttgtttgtttgtttttgagacgtagtctcctccctctgtcgccgaggctggagtgcagtgctgcaatctcagctcactgcaacctccgcctcccgggttcaagcgagtctcctgcctcagcctcccgagcagctgggattaaaggcgcctgccaccatgcctggctaactttttgtattttagtagagacggggtttcactgtgttggtcaggctggtcttgaactcctgacatcgtgatctgcccgcctcggcctcccaaagtgctgagattacaggcgtgagacaccgtgcccagccacccttttgtatttttagtaaagtcagggtttcaccatattggccaggctggtttcgaactcctgaccttgtgatccgcccgcctcggtctcccaaagtactgagattacaggcgtgagccagcgcgcccagcctgttactgttatttatgaatgttgaatgttattgcatgctttttctgcttttattaagatgatcctgcatctttcctccttattcattttctttattatggaatacttcaaaaacagagaaatagagaacagtacaacagtttcaataagagttgtcagtcgcaggccataggaatcaactttagcggtaaaatgattcatgaggaggagagtggcatctctctgaattatggggaagactggttctctgaactgtagatgctgttgcttctcctcccacctctccagcactgaatccttcagactgccagtagcactgctgcccctgctccaggaactctatcctatgccactgcaggtggggcaactcatgttccattcgaattagggctgagtgtttttagtttttattttttcatttttgaggctgagtcttgctctattgcccaggctggagtgcagtggcgccgtctcggctcactgcaacctctcctctcgggttcaagcgattctcctgcctcagcctcccaaagtgctggaattacaggcgtgagccaccactcctggccagcggctgagtgtttttatagggctgagcccaggtcatctgcttgtaccctagagatataggaagaaggttcaggtgttgggtgaccaaaaggaaagatatttatttgtctttccttccgtgcctgctggatcaatgacataagtatctccagatggcctgagggaagccttagcttccaatttatcagacccatgaccatggtagtacaattccctggtagaaacagtccccaccttaggcactagaatattcaaactcccaaatccaaggtcatagtgagaggtgacagcatgcgggcagcccttgcagccctcgctcgctctcggggcctcctcggccttggcgcccacttctggccacgcttgaggaacccttcagcccgccgctgcattgtgggagccccttcctgggctggccaaggccggagccggctccctcagcttgcggggaggtgtagagggagagacgcgggcgggaaccggggctgcgcgctgcgcttgccagccagcgcgagttccgggtgggcgtgggctcggtgggccccgcactaggagcggcccccggcccgcaagccccgggcagcgaggggcttagcacctgggccagcagctgctgtgttcgacttcttgccgggccttagctgcctccctgcggggcagggctcagggacgtgcagcctgccatgcctgaacctccccgccaccgcagtgagcttctgtgcggccccagcctccccgaggagcgccgccccctgttccaccacgcctagtcccatgcaccacccaagggatgaggagtgcgggcgcacagcgcgggactggcaggcaactccacatgcggcccccatgtgggatccactgggtgaagccagctgggctcctgagtctggtggggacttggagaatctttatgtctagctaaaggattgtaaatacaccaaacagcactctgtatctagctcaaggtttgtaaacacagcaatcagcaccctgtgtctagctcagggtttgtgaatgcaccaatgggcactctgtatctagttagtctggtggggacttggagaatctttatgtctagctaagggattgtaaatacaccaatcagcactctgtatctagctcaaggtttgtaaacacaccaatcagcaccctgtgtctagctcagggtttgtgaatgcactaatcagcactctgtatctagttagtctggtggggacttggagaatctttctttatgtctagctaagggattgtgaatgcaccaatcagcactctgtatctagctcaaggtttgtaaacacaccaatcagcactctgtgtctagctcagggtttgtaaatacaccaatagacactctgtatctagctaatctagtggggacatggagaacttttgtgtctagctaagggattgtaaatgcaccaatcagcaccctgtcaaaacggaccagtcagctctttgtaaaacagaccaattggctctctgtaaaatggaccaatcagcagcatgtgggtggggccagataagagaataaaagcaggctgcacaagccagcagcgggaatctgcttgtgtcctgtttgatagtctgggaggtttgttttttttgcactttgcagtaagtcttgttattgctcactgttatggtttatgttgcttttatgagctgtaacacaaaagtttgcagcttcactcttgaagccagtgagaccacgaacccaccgtcaggagcgaccaacttcagttgtgcagctttaagagctgtgacactcaccgtgaaggtttgcagcttcatttctgaatcagcgagaccagggacccaccagaagaaaaaaactccaaatgcatctgaacatcagaaggaacaaactacggacaactccgcctttaagaactgtaacactcaccgagagggtccgcggccttattcttgaggtcagtgagaccacaaacccaccaattctggacacaatagggatgggcagcaagagtttaggtgtaagagtgagagcagctacttcttcatcctgtttcctagatgtacgctttttttttttttttttttttaatgagacagtcttactctgtcacaggctagagtgtggtggtgcgatcttggctcactgcaacctctgcctttcaggttcaggcgattctcctgcctcagcctcccaaataacctgggattacaggggtctgccaccatgcctggctaatttttgtatttttagtagagataggggttcaccattttggtcaggctggtctcaaacgcctgaccacctgatccacccccctcggcctcccaaagtgctgggattacaggcgtgagccaccgcgcctggcctctagatgtacactttctagttatgaaggtgacaactccaaatgttagcatgttttaaaagacataactatcctgtaggccaacacttgaagcccacggggtgtcgtctttaggctaaccctgtaaattaactttcagcagctatttcaccgctttctaagccagctgcttctgggtggtggaacttcacgtctctattaagtccaacttagccattgtagattattcatgccaactccaaagcccaaacctgggtgagtgtatcagtgaattcagcccaatcaagccttttattttatttttgagacagagtctcactctttcgcccaggcgggagtgcagtggcacgatctgtgctcactgcaacttctgcctcctgggttcaagggattctcctgccgcagcttcctgagtagctgggactacaggcatgcatccaccaccacacctggctaattttttgtatttttagtagaaacaggtttcaccatgttggccaggatggtctcaaactcctgacctggtgatctgcccgcgtcagcctcccaaagtgctgggattataggcgcaagcctctgcgcccagccaagccttgtatttaccatctttcggctaacaatgcttagaatccactcccacacgtgctcccaagagcgttgtggatttgaattggcaaggtcttggaactaccttagtgtataaacattctctttctagagcaggccttgtactgcccaagtgggctatgttgggatctaactctctttttgaagctggaggaatgaagagaagatctggagtccctttttagtgaagcaactgtcctaggtgcagtcacagaaggtcccttaggcagggataagttggttacctctacacgggaggacttacctgaacagacaggatttgagaattcaaaagtgccaaagtctcagccttgtctgtgaccatttagatgctcctattctaagtctcaaggtcccactacgtccccactatgccctttcctaagcatttatttggagctcttacatgcacaatgaggccctggactgagtcttccatcatatccaccctgaaagtacaggagatgaagtctccttctaagatgccaccaaacctttcttgctgtctattgcattctcagttcaacattaacagcttttttttcttttgagatggagtttcactcctgttgctcaggctggagtgcaatggcatgatctggcctcaccgcaacccccgcctcccgggtttaagcgattctcctgcctcagcctttcgagtagctgggattataggcacatgccaccatgcctggctaattttgtatttttagtagagacagggtttctccatgttggtcaggctggtctcgaactcccaacctcaggtgatcgcctgctttggtctcccaaagtgctgggattacaggcatgagccaccgtgcccggccttttttttttcctttttttttggagacaggatctcactctatcacccagtagagtgcagtgttgagatctcggctccctgcaagcctccacctcctgggttcaagtgattctcctgcctcagccccccaagtagctgggactacaggcacgagccaccacatccagctaatttttgtgtttttttgtagagactgggtttcgccatgtttctcaggctggtctcgaactcctgatctcaagtgatccacccacctcggcctcctacagtgctaggattacaggcatgagccactgtgccaggccctcattcatagcttttgacttttccttttccctgtgtaatctctccagtgctgttgagagaggccaagtgactctataatctttatactgaccatcactgtcacagtgtctaagtgcccaagccattccaaatcccagtgccttatcctctatacctacccttcatcccatgccactgctgataatttgtgtgattttaatgccactgaatgccattgattgcacttgacccattccatccccactacacattttccaggattctattttgaggggatgtccttcgttgtagtaacccctgctaatctgagataaatcttacttgatcattttaatttttaaaaattccctaatgaattcactttatataaatatatataatatgtgtgtgtatatatatatatatatagtgtgtgtgtatatatatatatatatatactatttaggattttaaaatctttgttcttatttatttatttatttgagatggagtttcactcttgtcgcccaggctggagtgcagtggtgcgatctcggctcactgcaacctgcccctcccgggttcaagcaattctcctgccttagcctcccaagtagctgtgattacaggcatgtgccaccacatccagttaatttttgcatttcttggtagagatggggtttcaccatgttggccaggctggtctcaaactcctgacctcaggtgatccacctgccttggcctcccaaagtgctgggattacaggggtgagccactgcaccaggcctttttcttattttctcaccaatttaaagaagggtttccccaagttgcaattaattttggcagaaatgtccctgtattgatgattatctttttgtgaaagttgatggagtttgtcttcacactcttgtcctttttttactctttttttgagacagaatctcactctgtcacccaggctggagtgcagtagtgctggtgcaatcttggctccctgtagtcttgacctcccaggctccctctgcaaccacctgagtaactgagacaacaggtgcatgccaccacgcccagctaatttttaaaaatattttttgtagagacggagttttgccattttgcccaggctggtctcaaactcctgggttcaagtgatctgcctgcctcagcctcccaaaatgctgggattacagatgtgagccaccatgcctgaccatcactcttgtccttgatatccattttttcccaccgacaacaccatgggaatgttttcctattctttttccagacttctaggccacctagttttagttttctaagtcagtggagcccaatttttgcacaggacgatactcctagagaaagtcattcctttgcatggtgtgctggggtaatgaacctgctccctgtggctagagacacccattatctcaggtctgcctgaagggccgaggggagcaacctcttaggctcacctataatccatttgcccccagatgtggctcttatgactacattccagtgtgtaaagtgtgagaagaaatgatgtattcagccactgggctgtgcccttagaggaaatgcatgccttcccctcccttttattgcctctgcaggctgcaatgtggccacagtgtggggagtattgaactatacaagcaacaaaatagagtctgaatccccagcaactaagaactgctaacagagagataggaagtttgggtgtgacactggagtcaggcagccttgggtttaaatgctgattctgctaatccctagctgtgggcctcgggtgaagaatttaacctcatggtcttcagtttccttagctgtaaaatgctgggaggatgcaaggagctgtcataacaaaattgcctagcagtgttcatggtccagagcagggttttaacgaacagaagctggcacgtcaccactctctgtccctagcagcgttgccttttgcctcccttttctgccttgatccgcgcccccacccatctctcctcccgttctttcttcactttcacttcctggtctgcctctttcttaagctggactctgtgactgcaggtgtgtttaatgtttggctgccttcaggaggccagcaaggctccctggccaaccttttactttttttttttttttgagacggagtcttactcactgtcacccaggctggagtgcagtggcacgatctcggctcattgcaacctctgcttcctgggttcaagtgattctcctgcctcagcctcccaagtagctgagactacaggtgctcaccaccatgcccggctaatttttgtatttttagtagagaagggatttcaccttgttggtcaggctggtgtcaaactcctggcctcaagtgatcggcccaccttggcctcccaaagtgctgggaatacaggcaggagccaccatgccccaccatggttccctggccaacctgttactcattcctctttcttctacaatgatgcttctccaccacatcaaaaggtcctctcctttcctcttccacagccattggctgcagggaaatccccaggggcagagctgcaacttgccaggccagccctggaggcagccctgggaccctcttgctccctcaaccttctccctctcctttcccgggaggcccaggaaagggagctggcaccctgggccactgagccagcggcgaggctcagccagcaggaggagagcagcggatcaggactgcctcagacctttgataaaccaggtcttggaagaaggccactcactcttctctgtgtttctctgtgtgctggttcctgagatttgcaggacatgtttaatatttgcatggagaatctatgaaaagaaaaacagagagggaaggaaacaggaaccaaaatgccacttatcccatgagggcatcgaggcccgggctctgagtctctctgttgctggcgggggccaggcttcctgtggtgggagcggcaggcctcgcttctcaggcgtgggttccaccacggcttgaaggccccagaccacctcgcccctccctgggaactcagcctcttgtgcagccacataaaggtaaccagtgtctggtggcttgataggacagacttgtgagggacttcctgccttttgatgcatgccattcctgagagctgggccgggcctctgaagaggagaggtccctttcaacttcctgagtgtctcaacgttcagactcttggggtttgtggttagagacactggtatgaaaattgtgttctataaagtatgccctccgggtcccataaagctaacaggcaaagctctgtgaaaacaccccctaaccaaatggaccaagagggtctgaaaagcccttgaccttggagcttttttttttttttttgagagagggtctcgccctgtcgcctaggctggagtgcagtggcgcgatctcagttcactgcaacctctgcctcctgggttcaagcaattctaatgcctcagcctctggagtagctgggattataggcgcacgccaccacgcctggttaatttttgtattttttttttgtagaggcagggttttgccatgttggccaggctggttttaaactcctgatctcaagcaatccacccacctcagcctcccaaagtgctgggattataggcgtgaaccatctcgccctggccccttgcagctttagtgaagaatgagtgaaggactggaaagtctggcagtatgaggggatctgcccgagggaaactgtgttagcagcaggacccttctgcaaagccacccctgactccactccagtactttggagctgccttcaaatagaatatgattccaacagcactcacagttgctaagggccagacagacgtcactgcattctttttcttttttaatgtcatgtattttttaagacaaggtctcactgtcacccaagctgcagtgcagtggcaccatcatagcttactgcagcctcaacctcccaggctcaagtaatcctccccactcagcctcctaagtagctgagattacaggtgtgcaccaccacacccagctaatttttaaattttttgtagagatggaggtctctctatgttgcccaggctggtcttgaactcctgggctcaagcgattctcctgccttgatctcccaaagtactgggatcacaggtttgaaccactgcactcggcctcatcgctgcattctaatcctcttctcacagatggggaaacagactcaatgaggttgagtgactgccccaagagcacacagaggtaggattggagctcagagctggctgactccagatccaagatctttatgcttcaccagactgttccccacaagactatagggtgtcagcaaggttgaaaaacacaggacatacacgcttgctctctccgctattaattacctggctgaagtagtgtttgtcagtttctccactgtaaagttactctttttttccccattttccataccatcctctttggtcattcaccatgtacaacccatgtataaagagtgggagttaggaggtggagtatctaccgaaattatctggaacactacatgggagatttgtcttttgtctctatttacttatttacatttatttttaaaagtgtatgctactgacattttcaaatatgctcattatgttttcaggcaaagtatctttttttttttttttttttgagatggagtttcattctgtctcccagactggagtgcagtgacacaatcttggctcactgcaacctccgcctcctaggttcaagcgattctcctgcctcagcctactgagtagccgggattacaggcacccatcactatgcctggctaattgttgtgtttttagtaaagacgggggtttcaccatgttggtcaggctggtcttgatcttctgacctcaggtgatccgcctgcctcagcctcccaaagtgctgggattacaggtgtgagccactgtgcctggccctgggcatctttttaaactgcaggcactgattcagtaggtctgagctgggggctgagacctagtacttgtctaataggcttcctctgaagccaggctgcaattctgcaccacactttgaggagcaggttcaagaccagtgtatcttccgccatttcaaactactcaaaaatcctttctcctgtttcaaggtctgtctcagtataattccaactgcagccccactacactggtcctggctacttcctgtagaaccacatggaacaaatttaattgacctgaacttgatagcttaccaggtaacataccaggtatgttaaggcaggtagctgttagggtcccctgagttttcttttctttttcttttttattttttttgagacagggtctcactctgtcgcccaggctggattgcagtagcacaatcttggctcccaagttcaagtgattctcatgcctcagcctccccagtagctgggattacaggcatgcgccgccacctggctaatttttgtattttttagtagatatggggttttgctatgttggccagggtggtctcaaactcccagcctcaagctatctgcccaccaaagcctcccaaagtgctgggattacaggcgtgagccaccgcgccccgccccctgagttttctttctcagcttctccaaacattccttgaggtacgtgacttgaagtccctaagcactttgattcctctcctccttgtcccatttacagtaaagcacccagaactgaaagtattgcttgtggcgtgggctgctgggctgctggcagcaggtcaccatcatgtccctcatcctcagtgcaattctttggccaagagcccatgtcactaggatgactcataccgagcccattgtcaactaaaagcctgaagttgtttctacagaggctgttcttgactcacacctccctcaacttctacttcagcaattgattctttggatccaagtaaccctaggaaccactgttaagctccagttttctcacttgaatttggcctggggttgttcctgacgacatcagagagaggtgctctgaccacaggaacggggcagtgttgagttagggaacccctctatcattaggaccagtatgaaggtgtcattgctacttgcaaatcacatctttatctgcttcatttagggatcctgctattgacaattacacatctttaaaagaaagactctatagcagttgacgataatgagaagttattagttttagtttattgaagtgacccttctaactctgtaaccacttatcttcctcttcccattcatctactatgaggtgatataatatgtgatattaccaatataattctaatctatgctttttgtggaaaattcagaaaacatagaagttaaagatgaaaatttgcctgccaaggtggctcacccctgtaattacggcactttgggaggccaaggcaggaggatcacttgaggccaggagtttgagaccagcctggccaacgtggcaaaaccttgtctctactaaaaatacaaaacttagcctggcatgggggtacacacctgtagtcccagctacttgggaggctgaggcaggagactagcttgaacccaggaggcggaggttgcagtgagccgagattgtgccactatactctagcctgggcaacagaacaagattccgtcttaaaaaaaaaaaaagttgaaaataaaaatctcagatgatgccatcatctagtgacaaccactgttgacatttggtatatttcttttatatttgcatattttatcttactaatactcagtatcttaactgttttaacgatagatgttcattatagaaaaaagtggaaaatacaaatatgtcaaagaagaaatagaaatccccatggtcccattatctagaaacaaccctagttacacttgcatgtgtttcctttaagatgtttaaatcggccaggcgcagtggctcacgcctgtaatcccagcactttgggaggctgaggcaggtggatcacctgaggtcaggagctcgataccagcctgaccaatatggtgaaaccctgtctctactaaaaatacataaatttgttgggcgtggcgtgggtgcctgtattcccagctactcgggagaggctgaggcagaagaattgcttgaacctgggagacagaggttgcagtgagccaagatcacaccactggactccagcctaggtgacagagtgagactctgtctccaaaaaaaaaaaaaataaaactttaaatctgcctatatggtatatttttctgttaagaggtgaatttatacagtaatactatatcataaaggttttttccacttaacagcatgttggaagcatgttttagagaatatttagtgaactgactctatgtttttacattgtgaagatttactctgtaagactattatttcgcctctatttagagaaagttgcttgttttggcaattgctcttttgttatgagaattcacatgagccaagttccactttcagaaatgctatgggcaaagcttcatgatgtttatgaattcatacataaagactataaatttcagccaggggcaatggctcatgctgataacagctactcgggaggctgaggaaggacaatcgtttgaggctaggaattagagaccagcctgggtaacacagctagattccccgctgtcttcccctctaaaaataaatacataaataaattagtgtggtggcatgcacctgtaatcctagctactaggaagcctgaggcagggaggatggtttgaacccaggagatcgaggctgcagtgagctatgattatgcaattgcaccccagccttggcaatagagaaagaccccactctctatttttttaaaaaaaggctgtaaattggccgggcgtggtggctcacgcctgtaatcccagcactttgggaggccgaggtgggcagatcacaaggtcaggagttcaagaccatcctggctaacatggtgaaaccctgtctctattaaaaatacaaaaaattagccaggtgtggaggcgggcgcctgtagtcccagctactcgggaggctgaggcaggagaatggtgagaacccaggaggcggagcttgcagtgagccgagagggcgcctgtgtactccagcctgggcaagagtgagtgagactccatcttaaaaaaaaaaaaaaaaaaaactgtaaatttctgaatgagttcttaagatgaaatacatcttacttgtgcccacttccttttcttagaaattaactccaaaggccagtcacggtggctcatgcctgtaatcctagcactttaggaggccaaggtgggtggatcacctgaggtcaagagagtgagaccagcctggccaacatagtgaaaccccatctctactaaaaatacaaaaattagcctggcgtggtggtgtgtgcctgtaatcccagctactcaggaggctgaggcaggagaatcacttgaacctgggaagcagatcttacagtgagccgagatcatgccactgcactccagcctgggcaaccgagcaagaccccatctcaagaaaaaaaaaaaaaagaaagaaattaactccaaaatgttttcaatgcctacatacaatatttaaactgtgtgctttttaaattttgttttgattttttgagacagggtcttactcttggtggtgtgatctcagcttactgaagcctccattgctgagctccagtgatctcctacctccgcctcctggagtagctgggaccacaggtgtgcaccaccacactcagctaattttttgttttgtttcattttgagacagagtctcgctctgtcgccaggctggagtacagtggcgtgatttcagctcactgcaacctctgcctcctgggttcaagcgattatcctgcctcagcctcccaagtagctgggactacaggcacctgctaccacatccagctaatttttttatttttattagatatggggtttcaccatgttggccacgatggtctccatctcttgacctcatgatccgcccgccttggcctcccaaagtactgggattacaggtgtgagccaccttgcctggcccacactcggctaattttttgaattttttgtattttttgtagtgacgggattttgccatgttgccttggcctcccaaagtgctgggattacaggcgtgagccaccacgcccagcctttaaactgtcagtgatagcagcgaatgagttcaaatgaattcagaaaaaagacatatggattagaccacaatggttttttttattttgttttttgtttttttttttttgagacggagtctcgctttgttgctcaggctggagtgcagtggctgtgatcttggctcactgcaacctccacctcccaggttcaagcagttctctgcctcagcctcccgagtagctaggattacaggcccatgctaccacacccggctaatttttgtatttttacagtcagggtttcaccttcttggccaggctggtctcgaactcctgacctcgtgatctgcctgcctcggcctcccaaagtgctgagattacaggtgtgagccactgtgtccagccagtgccatattttctactatcctggtaaagtagatatttgtaccaaaccctatcaaacttgaaatgaatggaatgttcttaattttcaaggtgctatttttttttcttttttttttgagacagagtctcactttgtcacccaggctggagtgcagtggcacaatctcggctcactgcaacctccacctcctgggttcaagcgattcttctgcctcagcctcccgagtagctggaactacaggcacatgccaccacgcccggctgattttttgtatttttagtagagacggggtttcaccatgttagccaggatggtctcgatctcctgacctggtgatccgcctgccttggcctcccaaagtgctgggattacaggcgtgagccaccgtgcccggctacaaggtgctatctttaaagatcttctccagaatgacttgtgatatctttataggggtagggggtttcccctcagtatcagaatttctttacttacaagattataatcttgtaagtaattatagaatcttgtaagtaattgtaagatgatgatcttgcaggtaattatagaatcttgtaagtaattgtaagattataatcttgtaagtaattatagaatcttgtaagtaattgtaagattataatctgtaatcccagctactcaggaggctgaggtatgagaatcgcttgaacccaagaggcagaggttgcagtgagcggagatcatgccactgctctccagcctgggcgacagagtaagactctgtctcaaaacaaaacaaaacaggccaggcgcggtggctcatgcctgtttcccgtgaggcatcctcagctttcaatcaagttggggagtgaaggtcagtaaaccagtggctgagcaaacctccacccgacctttctcacagggctgcagatgaatgggagagccagccgagaaatctaaagtgcctcgcatccccagcactttgctaaaggaggtggtgggtggacaggttaagacaccctcccagctccctagcctcctgcggtattcagggagccattaggcaccttcttctgcagccaccagtggggcagtgttgccaagagggtaccaggaggagaatcctgcagccttgacctgtgcaactgataacgaactacagatgggatggagggcatgttacctgatgctggccagtagatcatgacatggagaactcaccactattcctgagaaacttggactttgactcaacagagaggtaatctttggatggtggaagatctctctaaggagtgagtattgatcaacaaaacctggagaagcaaaagaaacccacaaagacttcctagagaatttacatcttcaaggtcaaactgccttaatatttggtgcaagaatattagactatgttatcaatttgtgcaaaggtaaatttgacttccttgaacggctctcagacgatttgctcctgaatatcatttcttatctggatcttgaagatattgctaggctttgtcaaacatcacacagatttgcaaaggaggaagtcaggacacagagggccacagcacaacagggctggccagggctggtgctgtttgggataggaggacaacagccttcagcagcatccatgttgccgcaaggacatggtttcattctttttttatggtgtgcaatggcaaaagttaacagaagaatagaatatcttctacattcaagaccaagaagtgctcacaccttgcaggaattggagaagctgtgcatgtctgataaactgtgggaacagatagtccagtcgatctgcgacaccatcactcctgacgtgaggtccctggcggaggacacgggctggagacagctgttcttcaccaacaagctccagctccagcggcagctccgcaagaggaaacaaaaatatggaagcttgagagaaaagcaaccttaggcacacattttcctaccagcagggagctgaggcatggctgtgtttctcttcggtgtccaaatctcttccgtctccttttcttaagaactaagaggttttgctggtgcatggagccatttgtaactcatagaggatttgcacacaaatgcagcagaatctggcttcccagtgccttgctagagtcaccatcattctgaggtcaaatcatggcctgaggacaagggctgtaagacagggagccccataggccatcatcgtccttatcccacactcattaaaaaagagtgtttttaaatgattgttttaatgtttgttttaattgtatataaacaaacaataaatgattattagcaggtttttattagacatctattttatctaggcattggaaagggtaatggggcttttactttttttcctggcgttgtgtcatctgagtccagccatgaagctggtgcctgagtgtccccaccaggaaccgtgaagggcaggtaccacaggaggcacaaggggtgagtgcagttgccttcccaactttgttctgctaagtccatattcagggccctgtccttgtgggcccaggacgccaggctccatccccgcatgtggacagcttccgacctggcgctggggcatgactggagaagtgcaggaatactgcttgcggaccttgctcaaagtacaacttcccaggactacttcacattgttaaataaacctataaacattttaaaaaataaataaataaataataataaaaaataaagaatggtcctgttttcatgtccagtggtattttcctttcctcaaagattttacacctgaatgtatataattcattttacgtaagattcccatcccttaattttccgtcttatctttcccaagttctggctattaatttggtaattccctacatgttgtcattataatgtacatatatccccctttggagacataaacataaacccaagggaagagaaacatagagacttttattttttttttttaaggtttctaacccaatcatctctgaaatctgagcctggactagttgtggccactcacttaagagaggccttcaaaatgactttcctattaggagtgttctgtttttgtgtgtgtttgtttttttgaggtagggtcttactctgttgcccaggctggagtgcaatggcataatcatggctcactgcagcctcgacctcctgggctccagtgatcctcccaccttggtctcccaaagtgtggggattacaggcattagccaccatgctcggcccctattctgttttgttttttcatttattttacttcattttaaatgtttagttactttaaaaaaaaggtttcggtcaatgtcaaataatatttaacatggcaaggaaaacaataaaatgaacatccatgtaactacttaaaaaaaatcattaccagtatattgattttctttttttgtgtgtgatattctcagtctgctgccgagggtggaatgcagtggcgctggaatgagtggcatgatcacggctcactgcaaccttgacctccacgggctcaggtgatcctcctatctcagccttctgagtagctgggcctgtagttgcatgccaccacttccggctaattttttgtaggtatgggattttgccacgttgcccaggctggtttcaaactcctgggctcaagtgattcctctgcctcggcctcccaaagtgctaggattacaggcatgagtcaccatgcccagctcttgaatggttttaaagtgttattgttatctgaatatttgttttaaacaacaggatttaaccttacaggaaagcctaaatacaaacctctgcacgttaaccctatatacatttttctatgctgttacttacatatttgaatgtactgctttcaacttcaaaacaagcagtctcccccaagtctcccattacgttctgaaatcctaacttctattacctaatacaagactacaaattatgttcattggatggttgggaacaaagtgtgtgccataaaaataaggtaaatgtgaatgtgtgaaacagtttgctaagctttttgccaccgtctgacctcttaaattgtggtagcagctattgttcacattgatttgtatatgtttgtagtacaaagaagcatttctaaaggaccttgttcattgctttgcacaaaatggccacttaatatttgttgaatgaattgctggcactatctctggtatttttatttttatttatttatttatttttgatatggagtcttgctctgtcacccaggctgaagtgcaggggtgtgatctcggttcactgtaacctcctgtgttcaagcgattctcgtgcctcagcctccctaattgctgggactaccggcataagccatcacgcctggctaatttttttgtattttttttttttagtacagacggggtttcaccatgttggccaggctggtctcaaactcctgacctcaaatgatccgcccgcctcggcctcccaaagtgttgggtttacaggcgtaagccagcgtgcccagcctatctgtggtatttttagtgtgatgtctagaacttcatatacttttttggattactttaattgtagggctgtatccaaactgatcaaatgctctcggaggtaactatttggagaagtgacttcactgattgattaaaataaatgactggcatggaataaggattaaaatatattaatctgaaacatttaaaattgcattaatgttataacagcctaaagcaaaactaatgaatcacataaaaaatcccccacgtggccgggcacggtggctcacgcctgtaatcccagcactttgggaggccaagccgggcggatcatgaggtcaggagattgggaccatcctggctaacacgatgaaaccctgtctctactaaaaatacaaaaaattagccaggcgtggtgccgggcgcctgtagtcccagctacttgggaggctgaggcaggagaatggtgtgaacccggcaggtggagcttgtagtgagccgagatggcgccactgcactccagcctgggcgacggaacgagactccgtctcaaaaaaaaatcccccacgctgttgtccttactagtttactttgtgctagacacttttgcatgtatatgcatacaacttttattctgtttttaaactttgcattacatatacattcttccatattatatgatcttcattaaaatagttaaatggctgcataaaaaaccatgtggttcctggaccattatgctgttccctcattccccttttgtttttaatggaatagagcaaagaacatcttctgtattattgtcaagaatagtgagaggtgacagcgtgctggcagtcctcacagccctcgcttgctctcggcgcctcctctccctgggctcccactttggcggcacttgaggagcccttcagcccaccactgcactgtgggagcccctttctgggctggccaaggccggagcccactccctcagcttgcagggaggtgtggagggagaggcgtgagctggaactggggctgcgtgcagcgcttgcgggccagctggagttccgggtgggccagggcttggcggccccgcactcggagcagccggccggccctgccggccccgggcaatgagggacttagcacccgggccagcggctgcggaaggtgtactaggtcccccagcagtgccagcccaccggcgctgcgctcaatttctcgccgagccgtagctgccttcccgccgggcagccctcgggactgcagcccgccatgcctgagccttcccccgcctctgtgggttcctgtgcagcccgagcctccccgacaagccctgccccctgctcacggcgcccaggcccatcgaccacccaagggctgaggagtgcgagcacatggcacaggactggcaggcagctccacctgcagccccggtgggggatccactggatgaagccagctgggcttctgagtctggtggggtcttggaaaacctttatgtctagctcagggtttgtgagtgcaccagtggacactctatctagctactctggtggggccttggagaacctttatgtctagctcagggattgtaaatacaccaatcagcactctgtatctagctcaaggtttgtaaacacaccaatcagcaccctgtgtttagctcaggatttgtgaatgcaccaatcaacactctgtatctagctcaggatttgtgaatgcaccaatcgacactctgtatctagctgctctggtggggccttggggaacctttgtgtccatactctgtatctaactaatctgatggtgacgtggagaacctttgtatctagctcagggattgtaaacacaccaatcagcgccctgtccaaacagaccacttggctctaccaatcagcaggatgagggtggggccagataagagaataaaagcaggctgccagagcctgcagtggtaactcgttcgcgtctctttacacagtgtgaagtttcagttttttgctgtttgggtccacactgtttttatgagctgtaacactcaccacgtaagtctccagtttctatcctaaaggcagtaagacaacaagctcaccgggaaggatgaacagcgccggacacgtcgccttaagagctataacactcaccaccaaggcctgcagtttcactcccgagctagtgagaccaagaacccacctaaaggaaaaaactccgaacacatcttaaggtcaagaaggaacgaactcctgacacgccaccttaaaagctgtaacactcaccaccagggtctgtggcttcattcttgaagtcagtgagaccaagagcccaccaattctggacacaatagggctgagtgcggtggctcaggtctgtaatcccagcacttcgggaggccaaggcaggcagatcatttgaggtcaggagttcgtgaccaacctgggcaacatagagaaacctaaatgtccctcctaaacgtgtctttaccaaaaataaaagaattagtggggtgtagtggtgcatactgtgatctcagctactgcagaggctcaggtgggaggatcatctgagcctgggaagttgggactgcagtgagtctgggtgacagggagaccctgtcttaaaaaaaaaaattttagcagtatagttacaaggtcaaaggatatggtacatctttagaaagttgttatctttctgctcctgagataaatacagtagtgtatgaacaactcttcatacgttactccaaggtttatcttgttaattctttaagacgtatcatctccctatccttggctgcacctgaaaagagcgggactctgcaggtaacccgattttctccaccaggtgagtcccggatggaggcgtcaactacaagaccaggaacagcactcctggggctttgctggaaccatcggcgtgggaatgctgtctcttccctcgccagaaatacgacaagttcccggcgggtagcagacttggttctaattttcctcgccccagcctcttggagcgccctgcatgctgtgggcgtctaataaatgcagtcggccctgcttggtctaaaactctcccttgagtggaccggacactaaacccctccaggggtcacagctgccgctcccgccgccactttgctccttgcctgctcccttcccgcgttccgcctgggaccctcggcggcagctcacaccttccctcagtgccggtgcccgctccgggcatctggcgcgcgcccgccggccccgccccgctgaccccaccggccccgcctcccatctccccctcgcccccccggagccgacaaatggccgcggcggcctcaggtccggcgtcactcagacaagggggcgggtggaggaggaagcggccaagtccacagtcctgctcccgtgccgccgagcaccgcccacctcagctgaccagccctgtccgctactaggcctcgcctagaggagggaaaggccgtggcgtccgctccctccgcggctcatggcgacgacgcttggcacatccgggaccctcaggccgctgcagtcgcgtcgccggctgctcgggccccagccccggccgctgtggtgactccgccgcgcctcgccgtcgcccccgtcccgcccgccgccccagccgccagggacatgtctaacctcggaggccgtaggaacgggcctgtcgaagtgcgcctgacaggtgaagggggcgcggcgggccgggctgggcagccgcgaggtgggcgagctggcaggggtgcttgtggccttgggaagggccagggtcgcgatcagtggtgagttgggggtcggaggtgtgggaaggcctagttcagagagagcaattggaaaaccacttgttccggtttggacattgtttaaaaagccgaggatgactcggggcgggggggtggtgttttgtggaggggagggtacaccagttcgcatcgcaggcggatttcaggtcggaaagtcttggtcaaggagcccgacgctgcctcccggggctcggggaacagcccctgggctaccgcccaggtgagatcgtgaaggggatgaagagctcccgtggcgaggattattgaattcggttgctgactgcgcgcagtaaacactccttaaagatggagcgcttaacgggagggtgtgcgtctgtgttcccgggttgttaccttgcacacacccacttatgcccgcgtgaaaaacctttactccccgccgccggccaccgctgccagggtcacacaccttaaactcacgtctctctgaggaggggagacaggttgacttccggtgtgcctgtctgatccgacggcttgggctcattgtacactgtgttttggaagtgtctgattgtagggtggcatgtttgggggttgttccttataggccgcagaacttgtgtctcacttctagctccagacctgctttaaaaacacacttttttttttggtgggggggcggagagggtacaattctaagtatgtcctcatacaaattttcgaacaaactttctgttactctccccaccctcccccttcctttttcgaaatggaaaagagtgtccagaggggttgctagatagaagactacacttacaaagtgtttatgattccaggtgcatgaaatctttaacattacaggtacgttttgcttacagtgccatttttggtattcttacagggacatgccacccccgttttaggagaacttgtatttggtttgagaaggaattggaatcacggcgttatcctaccttcaccatttacccctgataaattgtccacgtttatatttgggtgagtggtgagaaagataattttccgtagaggatttgtgtgtgcgtgcacatgtactaataaactgtaattatatttgcccacactagactttgagatttatttggactaattttgcagttgaatgcttgtgtgtcacatcccagtccactggctaaacttgctggatgaaaacttgcagtgaatttggtatttgagaatttagcttgaatgtgtatgttggctgcaatttagataatgtattaccttcatgacagttttcctttccctagggaaaattgccaggaatcattaactgagtggttcttaatggaaaacctggattggaggatacttatattcccccccaccccccattcagtgtccttatattgggaggagtcagtggaaacctttgtaggggatctttgttgctttggagtttatctgttgctgttactatctggagtcagtgattgtggaaagaacatgtgatcccaggtgtgcagaaagcatcagaaataggctgtttccatttactttcctctgggctatatagagaaaatgaggaaaaagtagggattttgattttctgcagataaaatgagttgaagtttttagtatgactcaatagatcttaaagtgtttatctgcagtttctgtactgcctaagatacattataaaaatctgtatgtaaagtttgttaagaggaaagattatgcttatcttttaggggaagagggaatattgagctacatttatagagtgattttgtttcaggtttttctgaggaattttaaataccctgtgtcctcttaatagtaaaaacagtttgaggtactctaagtttcttacaactatttgtctctgaatagttttctcttaaaatttgacaaatattaaaaacattgtccttccttctttggttacagtggagtctcttctgttttgccaggaaagttaacatattgtttttttcatttttgttcatcatttacaaattagatggtatagattttagcaaatagatctcaagaactggattcaattagcagcttttaaggacataaacattaaagggttagatggaaaagattgttttgactgactggataaatgacagggctgtgtttgatgtgtgtccaggaattggtctggagctggtgcccaacttctcagtccatcttgagaagccaaataaaatacttaacctaggcctcattttgttcaaaaaaaaaaaaaaaaaaagttgattctttgtgaagaccttaagaaatgtttggcatacctttagactaagtgacagttcatttagatctgggttccctaatagaggaaaaaaaatcacttaaaaaaagacagatcccacagcgaatttatatttggtttacaatacacttgggctataagatgttttaaaattattgttctttgctttaagttaataacatattagtattttaaatttatagagtacctttgatttcaagatgctgtataaacttcagttacttggtaataaccttattgtggaattgcccctttactgaaaggtatcaacatttcttgcgtggtgacacacacacacacacacacactctctcacacactcatacacactctctttctgaagaaaaggaaacatttaaaccatgagatctctgcccacaattgatattagacgtttccacatactattcttaaaaccactatcagtgaactgtttggtgtttgtcaacgctaacaaggtggggctaatttaataatttaatcccaaattttagattcctcaggcaattgggggttagaatccgatttcatccatcaagctacttctgttctttatgacacattaacatatgatcattaaaatgggctgtgtggtaacactattaacttcaactaatatttctataacaaattgatgacaaaatgtataatttctatatcattatgtttatatgactgtcttatacaggcttttcttccaatgggttggatagaaaaatattcttttttttttttttttttttttttgagttggagtcttcctctgtcgctcaggctggagtgcagtggtgcaatctctcggctcactgcaagttccgcctcccaggttcacgccattctcctgcctcagcctcccgagtagctggtactacaggcacccgccaccacgcccggctaactttgtttttgtattttaagtagagacggggtttcaccgtgttagccaggatggtctcaatctcctgacctcatgatcctcccaccttggcctcccaaagtgctgggattacaggcatgagccacggtgcccggcctagaaaaatattctttacagtaaaaactttgggataattttttagaccattattgtttctgaaaaccaaaggctggaaaaagcagcttagtgtaatttctaatattttaaattcttaggtatggagaagtagaataagattactcctccagaacatttatttcagacatttttatacatttaatgtttttgtatgctgtttctcatgttattaatttcaaagcccttggcaataaggaggttaaacttgtctatagtgtaaggaaatttaactttaaaaattttcctttagatatgctagcatcttaatcttggtacactacatattttatcgagtcaaggctttaaaaattatagcttcattctgtttgacaggtttttaagtatgcctatacaccataatgattttatttattttttaagatggaattttgttcttggctgaagtgtaatggcccaatcttggcccactgcaacctccgcctcccaggttcaagcgattctcctgcctcagcctcccgagtagctgggattacaggcacccgccaccatgcctggctaattttttttgtatttttagtagagatggggtttccccatgttggccaggctggtcttgaactcctgacctcaggtgatctgcctgccttggcctctcaaagtgctgggattacaggcgtgagccactgcaccgagcccataatgacttttatatactataggtgttagtgatttgaatgtccccagttcattttatttttcttggtttctgagaaggaagacaatgtagctgagctctttccttttctcttaaatcctgtctactagtctaaccctcttcaggcaggcagtagaacatgtcaaggtccttgatgtagtttggtattcatagtaaagtctgtgtattttagtcatcacttttacttttttcttgttggttgagctgttactatcacagcatactaacatctcatttagcataactcagttttcaagataaatgaagggtcacacttaggcatacaagattttattttagccttttttatttttttggcagagtctcattctattgcccatgctggagtgcagtggcaacagcgtgcagtgagtgatcccggctctctgcagctttgacctcctggctcaagtgcttttcccaccttggcttcccaagtagctgggactacaggtacgcgccactgtgattggctaattttttttactttttttttttcctctccagtagatatggggtttctccaggttgcccaggctggtcttgaacttctccacttaggagatcctcctgcctcagccttccaaagtgctgggattacaggtgtgagccaccatgcctggcctattttagtctttcttggtgagagtcttaaagatgtagtatgtcctcctcttttcaaatagatcatacttagtagaacttaatgttttacttatgattcaatataattatgaatataaattattgttttgttgcatatgcaatgtgaggatctcattagggcctgtagagagaagtatttcaccctggctaaatggtgataggtcatttaacttgttcttactagtttttctctttgccttcatttttgtttactgatactttctttgtctaagaatgctgaacccttgaaatacgccgttgtaatcagcattgttacgtgtttctgtatgattgacatgtattgaaagtttaagtgccagatgctatgttaagttcgtatctattatcacttttaattttcatagtagctctaagtgataggagaaactgaaagttggagaagtacatgtcacaaccaaagttgtctagaaagcttattacaagtttattagaatttgtgtggaaaaataaaattgacatattctgttcacttggaattgcactcgcccctagcaatacttgcccatcttttaaggctcaagtcaaggattactgttagccctagaactttccctgacctgagttgaactgtcctctgtgactctaggaaactcttcttttagtatcagacctaacccgctgataggcatctattgttcctatgctttaagttccatgaagtcaggatccttgtgtgagcatggattaagacctttttggcattttatttaatgaatgctggagagctataaatagttccgaatagttctgcgtgtgttctttatggctaacgcactgggtatgagtggcaagaggtgaggctcttggacagggaccaacctagtttaggaccttattatagtgtgccaagaggttcattttttttaaggtggtgggagccattgcaggattttaagcattgatatatttgttgtttagacacaatctgggagcaatatggaggatggactggaatgggagccatgaagactggttttaggataactggttaagaagattcaacagcagccatcgttcagattttttttcttgtttgaacatttatttccaaattttttattacaaataattgctgtaagcatcttggtgtaggtaactttgatttttttaaaaggattttttttttttttaggatgcttccataaaaatagtgttactgagttcaagtgtgtggatatttttaaggttttgtgattaatttttcctttaggctctttcttaaaagagttgggcctgtttagagcagcagtaaataaagatgtccctttttactattctgttgtaagcattagctaattgcattttaaatattttgctaatttcatggcatgtgccatttaaacattcgtgaagcagaatattttcctgtctgtttactaatcatatttattttcattgatttgtttggccttgtcctagttatgttaaagccttagtgtttttcttattgatctacctgatacttacaaatatattaatctgttgtcatatttgctacaaacatttccatggtgaattatttgtcttttaatattggtcattgtttggacatgtagaaatgtgttatcttaggagtcaaaatctgtccaactcttgttttgtttttcctgttctatacttggaaaacctttttcttcaaggagtttgatgaataagtacgttatatttagtgttttttaaaaatgctttaataaactattcccccttcaattcctatttagccgtctcatcattatttattaaccagttcttcctttccacagtgatgtagtatcttttcagttaattataatagagtcagatatatctcttgttcagtgccatactgttttcaatattgtagctttataatttagtttaatattctcactaggccagtttttttaagagatggagtctcactctgccacccagggagtacagtggcgtgatcttggctcactgcagcctctaacccctgggttcaagtgattctcctgcctcaacctccctagtagctggaattacaggtgcatgccacgactcccagctaatttttttggggtggagatggggttatattggtcaggttggtctcgaactcctgacctcaagtgatctgcctgcgttggcctcccaattttttttttttttttttgctattcttattttttgtttccgcataaatattaaacttgttaagtttaataagaaatttcactggggccgggcgtggtggctcacgcctgtaatcccaggactttggggaggctgaggagggtggatcttctgaggtcaggagtttgacaccagcctggccgacatggtgaaaccctgtctctactaataatacaaaattagttgggcgtggtggcacactggggaggctgcgtcacgagaatcacttgaacccaggaggcagaggttgtagtgagccgagatcatgccactgcactcagcctcagcctgcctgggtgacagagtgaaactgtgtctcaaaaaaaaaaaaaaaaaaaaaaaagacatttaattgggattattattagaatttccttactttgggaaaaagaggcatctaagtttatttagttttcttacccaggagcatgctaagtttttacatttatttaagctttggctcatattgctcaggatagctttataattttcttcctatgtttgaatttaatttcagataatttatatttgtctgatttacattgtgttttctaatcctagttattgcttgtatttaggaatgcagttatatgtatttttgcttgattagaacaattttggctgggcgtggtggctcatgcctgttatcccagcactttgggaggccaaggtgggaggatcacttgagcccaggagtttgagaccagcctgggcaacatagtgagaccccatctatatatttatttatttatttatttatttatttgttatttttttttgagactgagtttcgctcttgtcgcccaggctggagtgcaatggcgccatcttggctcactgcaacctctgcctcctgggttcaagcgattctccggcctcagcctcccgagtagctgggattacaggcatgctaattttgtatttttagtagagacggggtttctccatgttggtcaggctggtctcgaactcctgaccttaggtgatccgcctgccttggcctcccaaagtgctgggattacaggcatgaaccactgtgcccagctgatgttagttttctaggtatcaagtgtttggtacttgttacagttgaatgttaacacttaaaatttttcttttctcttggattcctccccaacatataagtagttgaacaaagtgagaaattttgtttattttattaaaatttttttaaatacgagcagtctcctgaacaagaatagtttcagacagactctctgttttagaatagcttctgatggcattggctaccttttttaaaaaccacctttgatattgtattaaaaagtatcaaaacctaatcttaagtttgattggcagtttggtttggttttatacaaaaattgatagcagacataaagtttaaattatttatttattttgagacagttttgctcttgttgcccaggctggagtgcagtggcgccatctctgctcaccacaacctccgcctcccgggttcaagtgattctccggcctcagcctcccgagtagctgggattacaggcatgcgccaccatgccagtctaatttttttttgtatttttcatagagacgtggtttttccatgttgaccaggctggtctcgaacttccaacctcaggtgatccgcctgccttggcctcccaaagtgctgggattacaggtgtgagccactgtgcctggcctaaattttaaatttttaaataaactgtgatgattaatttttagggaggaattaccacatagatgattgcaatcatgcaatgctcttcccatttcttcccaaaaagtttcctcttacctcttcatagccagttgtcttctttaatacccagaacttgtcaactactgatctgttttctatcactataattttgccttttctaggattttgtgtaaatggaatcataccgtctgcagtcttttgggtgaggcttcttttaacataatgcttttgagattcatccatgctgggtatcagtactttgttccttttcattcctgaggaatattgcattgtacatcaatttgtttatctgtttgtaaatatccacagacatttgttgtttccagtttttggccattacgaataaatatttgagtacatggctctttgtgaacatgtttttcttgcccttgggtaaatgagtgggattgttgcaccatacaaaaagtatgcattttaactttttaaaaatctgctgggcagattgcttgagcccaggagtttgagaccagcctgggcaacatggcaaagctccgtctctacaaaaaatacaaaaattggtcaggtgtggtggcctatgcctgtagtaccagctacccaagaagctaatagaggattgactgggcctgggaagttaaggctgcagtgagctatgctcacaccactgcattctagcatgggtgaccctgtctcaaaaaaataataataatttttttttcaaagttgtaccattttgcatttctaccagcattgtatgagtttcagtagttcctcatcctagtcagcacttgatattgtctttgattttagccattctaattggtaggtatagatatttctttatactttaatttttacttcattaataacctacagttttaagcatattttaatgcacttatttattgtccatataatctttggtgaatatctaagtcttttgttcatgttttaaaattggattgttttcttattaagtttgagaattctttatgtattttggatataagccttttatgagataaatactttgcaaatatttcctcctggagtgtagctcccacccggcccccaaaagatgtcccaaagagaagaagttttgaatgctgatgaaacctgtttatcaattttttttctttcgtggttcatgttttttgagtcctaactaagtcttttttttttttttttttgtgagatggagtctcattcttgtcacccaggcaggagtgcagtggcgcgatcttggctcactacaaggtccacctcccgggttcaagcgattctcgttactcagcctcccaagtagctgggattacaggcgcccgcgaccacgcctagctgatttttttttttttatttattttcagtagagatggggtttccccatgttggccaggctggtcttgaactccctacctcaggtgatccacccgcctcagcctcccaaagtgctgggattacaggtgtgagccaccgtgcccggccctaactctttttctaacccagagttctaaagattctctctgtgttttcttcagcattatttataattttaactcatccgtttaaacttattttcaagttaattttttaatatgctgtgagaagtaagagtcatggtttttttttcatatggatattccatttttgtagcactatttgttgaaaatacttttgtttcctccattgaattgtcgtggcaccttggtagaaaatcagttgacaagccaggtgtggtggctcatgcctgttctttgggaggccaaggcaggcagatcacttgaggtcaggagttcgagaccagcctggccaacatggcgaaaccccgtctctactaaaaatacaaaagttagctgggcatgctggcgggcgcctgtaatcccagctactcaggaggctgaggcaagagaatcccttgaatccaggaggcggaagttggagtgagcccagatggtgccactgcactccagcctgggtgacagaatgagactctgtctcaaaacaaacaaaaaaatcagttgacaatatacatataattctatttctggactgtcttctgttttctttatctatgattctacccctttaagtttattctttttaacaccgtgctgtcttgattactatagctttaaaataaagcagctttcaaacaaattgagtctttgatttagaatcttgtaatgctttggagccattgtttaatttgttcagccaataagtatttatcatttttgatatgtgacagatattatttttattatgtggtaccatgaatggagatataagaaatcagaaaaagcctagatggggtcctgtagttttcctttcagaatttctattatgaaccttacatttttaaattaattaatctttttcatctcttactatgtgatgaaagaggattatgacaaccaggacttaacaaagtttgcttgtttaccagctgtcagtcccctcaaatcatttttggaaaaaggtgggatataaagaataaacatatctaaaatgtgaccatagaaaagaaaggaggtgattggtgtgttaagtatgggttggattatgagtatttatcgtttttgcttgtattatttttgtgacagggtctctgtcacccaggctgcagtgcaatggcacaatcagagctcactgtgatcttgaactgggctcaagtgatcctcccacctcagccttctgaatagctgggtctacaaacatgcactaccatgctcagctaatttttaaattttttttatttttcgtagagatggggcctcactgtgttgcccaggctggtctcgaactcctggcctcaagtgatcccctgccttggccttccatagtgctgggattataggcctgagacattgctgtgcctggcttgcttttgcttgccttattttatgtgtatattttttctaaaaggcaaaagaaaggaagaaacttaattttattagaatgtaagcatatatatattcaaaaaatatatacacatatatacaaatatatgtgtatacacatacatatttgtatacacatatacaaatatgtatgtgtatatattttttgagatagagccttgctctgttgcccaggctggagtgcagtggcgtgatctcagctcactgcaacctccgtctcctgggttcaagcgattctcctgcctcaccctcctgagtaggtgggattacaggcacccactactacgcccagctaatttttgtatttttagtatacatggggttttaccatgtctgccaggatggtctcgatctcttgacctcgtgatccacccgcctcggcctcccaaagtgctgggattacaggtgtgagccactgcacctggcctctttatttttttaaaagagacaaggtcttgctctgtcactcaggctggagtgcagtggcatgatcatagctcactgtagccttgaactcttgggctcaagtagtcctcccacaccttagcctaccaagtagctaggactataggcgcctgccaccatgcccagctatttaagaaaaaacttttttgcacagatagagtttcaccgtgttgcccaggctggtctagaattcctggcctcaggtgatcctcccacctgaggattacaggtgtgatctactgcacctggccaaatttcaccttattttgacttgagttttttgagcggattggcagggagcaattaagtaataggctaacaggacctaatagtaatagtgtgttaaaaattatttttttcaggaatcatattgacaggtcatgaaaatgagaccaaaagatctctggaagcgattaatgataaaatttcatggagaagaaggccttgactacggaggggttgccaggtaaggacttgcttgccagcttatgacatacgcatctttgtacttaccaatttaagatatttcctgcggtataactttctcatcgacatttattttttgggtattctattccctaatgtttgtattactgaggatatcctaatagatatattcataatgaggttaggatagtactgctactggacaagtattttagaactccccaatagatcatctgagtccaatgagactgcaggccctgtgttttctccatctctccttcagcatgttattgcctctgctttacattgtcaggaacagttttgagatttaaacgatatatgacgaactgaatactggttctctttgcttccatttgttatgccttttttccttgttaaatgaatgtgtatgcatgcatgtgtgtatacacatgtacatatcatgatggtcctcagaatgtttcagtacagaaggtataatgcttctgctacatttgtaactcacaggtcaagtcaaattgatttctttttcttttctttttttttggagacagggtctccctctgtcacccaggctggagtgtagtggcgcgatctcgggtcactgcaacctccccaagctgggctcaagagatcctcccacctcagcctcctgagcagctgggactacaggtacaagccaccacagccagctaatttttgtaatttttttgtagagatggggtttcgccatgttgcctaggctgatctcgaactcctgagctcaagtagtctgcctgccccggcctcccaaagtgctgggattacaggtgtgagccaccgcacccagccagtgatttatttctgatattatatttactataagaattcttttctaaatatgaaaattagttttatataaatgtaggataaacactgtagctctctactgaaatgttttaaggatcattgtaattctgctttccctaatcttaaatccaaccaaaattaaattatgttttcaataattcccattaattattatttagcattacatgtgtgtacttgtagacttattttcattctgttatcttttaaacctatagatgggtggtttctttagcatggttttttttttttttttagtatttattgatcattcttgggtgttttttggagagggggatttggcagggtcataggacaatagtggagggaaggtcagcagataaacaagtgaacaagggtctctggttttcctaggcagaggaccctgcggccttccgcagtgtttgtgtccctgggtacttgagattagggagtggtgatgactcttaacgagcatgctgccttcaagtatctgtttaacaaagcacatcttgcactgcccttaatccatttaacccttagtggacacagcacatgtttcagagagcgcagggttgggggtaaggttatagattaacagcatcccaaggcagaagaatttttcttagtacagaacaaaatggagtctcctatgtctacttctttctacacagacacagtaacaatctgatttctctttcttttccccacatttcccccttttctatttgacaaaaccgccatcctcatcatggcccgttctcaatgggctgttgggtacacctcccagacggggtggcagccgggcagaggggctcctcacttcccagacggggcggccgggcagaggcaccccccacctctcagatggggtggctggccgggcgggggctgccccccacctcccggacggggcggctgctgggcggagacgcccctcacttcccagactgggcggctgccgggcgaagggtctcctcacttcccagacggggcggctgccgggcggaggggctcctcacttctcagatggggcggctgggcagagacgctcctcacctcccagatggggcggcggggaagaggcgctccccacatctcagacgatgggtggccgggaagaggcgctcctcacttcccagactgggcggccgggcagaggggctcctcgcatcccagacgatgggcggccaggcagagacgctcctcacttcccagacggggtggccgccgggcagaggctgcaatctcggcactttgggaggccaaagcaggcggctgggaggtggaggttgtagcgagccgagatcaccccactgcactccagcctgggcaacattgagcactgagtgagcgagactccgtctgcaatcccggcacctccggaggccaaggctggcagatcactcgcggttaggagctggagaccagccaggccaacacagcgaaaccccgtctccaccaaaaaaatacgaaaaccagtcaggcgtggcggcgcgcacttgcaatcccaggcactcagcaggctgaggcaggagaatcaggcagggaggttgcagtgagccaagatggcggcagtacagtccagcttcggctcggcatcagagggagaccgtggagagggagggagagggagagggagagctagcgtggatttttaaaaataatctcttgcacatcatacttaggacttgatagtttttgtggaatttgtgttatttacttataactagagtttgaatgtttattgggaaaacttaatcatgatcatctgctggtggcatctaagtactataattatatgtataggtcaaataagtagtttaattaattaatttcttagggacagggtctctctctgtcacccaggctcaatggagtgcagtggtgtgatcatggctcactgcagcctcaaactcctaggtacaagtgatcttcttgcctcagcctcctaaagagctaggactataggcacatgcttctatgcctattaaatttttttttggccagacacggtggctcatgcctgtaatcctagcactttgggaggccgaggcgggcagatcacgaggtcaagagattgagactatcctagccaacatgatgaaaccccgtttctactaaaaatacacacaaaaattagctgggcatggtggcatgtgcctgtagtcccagctattcgggaggctgagacgggagaatcgcttgaacctgggaggtggaggttgcagtgagccaagatcgtgccactgcactccagcccgggtgacagagtgagacactgtctcaaaaaaaaaaaaaaaaaaaaaattagaataattagtgtcagcattaagctagtgctgagaccataaccactgtaaacaggcactcaaagagaaggaagactaagagtcttccttcttgaatagttcttgaacttccaagagattcttgacatgccaatcgtaagtttattttgttcccccatcctagctataaggctgtttggaatggttctttttcttggtatctccagcaagtgcctggcccagaatcatacaagatgagggaataaattatgaccatcccaatgtctttaacataaaataacaaaggtaggtgaagggaactggaaggaaggagacaaatgtgaattttaagatttttatggagcagagatgctaccctgtcccatcaagctttgaggccctggcaagacaggatgcctgagcctgcaaagcagaagctagaccttgggcaggagtgaactcaacatggtcagtgccactctgtggagccctgtggggtgcccagcctgcatccccagcagacgtcactctgcctccagctcgaggcaggggctgcagagctttcctcttcaaccttcagcttgagttggcaggtgcacagtcaaaaccttcagggtcctagagcattcattttcaggaagtaaatcttcaggatgtactgaagcatcttcagaatagcaaatatgaagaggctgacccacactgacagttctgtgatttacatgatcatattcaagaaacagagcgaggccaatcacatacccatatggaaaaatatgagctttgacttctaactcacaccacacacaaaaattaatcccagaaagatcataaacctaattgtgaaagataaatcactaaagcttctagaagataatataggcaaataccttcagatccttgggggagatgaatatctcttaaatgggacaaaaaccaagcaagccataaacaaaaagactgataaactgcacatcattaaaagaatctctgttcaataaaaataccattaggacatttaaaagtcaagccctatagactagaaaaagatacttgatatatatactatttttgtccagtaaaagactcatatctataatatacaaagagctccttcaaatcaatacatacacatacaactcaatttaagactgggatgaaaacttggacagacattctataaaagaggattgactggccaataagtaaatgaaaaagtatcatctttagtcatcaaggaaatgaaaattaaaaccactacacatctactagagtggctaaaatgaaaaagattggtaacaccattggccaggataaagagcaactagaatgctcatttgttgccaatatgagtataaattagcacaaatagttcagaaaactgtttggtggtggtatctattaaagctaaacatgccaggcacagtggcttacgcctgtaatcccagcactttgggaggctgaggcgggcggatcatgaggtcaggaggtcgagaccatcctggctaacacagtgaaaccccatctctactaaaaatacaaaaaattagctgggtgtggtggcacgtgcctgtagtcccagctactcaggagggtgaggcaggagaattgcttgaaccggggcggtagaggttgcagtgagccgagatcacaccactgcactccagcctgggcgtcagagagagactccgtctcaggaaaaaaaagtaaatctatccaagaacctagcaattcctttcccaggtatatacccacagaaataagcactgaggttctccaaaagcacgtacaagatgttcactacagctttcttcataatagtcaaaacctggaaacagctgggcgtggtggctcacacctgtaatcccggaactttgggaggctgaggcgggcggatcacaaggtcaggagttcgagaccagcctggccaatatagtgaaaccctgtgtctactaaaaataaaaaaattagctgtgtgcggtggcacgtgcctgtaatcccagctacgtgggaggctgaggcaggagaatcacctgaacctgagaggcagaggttgtagtgagccaagatcatgccacttcacgccagcctgggcagcacagtgagattccgtctcaaacaaatctggaaacaacccaaatgtccattaacgagaatgggtgataggctgtgatatatttttacaatggagtattacagaacaatggaaaagaatgaactacagtcttatgctgtatgtacagctgaagctcacagatgtagtgttcagtgaaagaaaccagatacaaaagagtacatactgtgtgattccatttataggcgtgaggttcaacaacaggaaaaactaacgcacggctctagaagtcagaatggtggttttcaaggggcacaatgactgggagaaggtacacaggagcctctggtgggctagacatgttctagatcttgatctaggtggtggtcacagggtgcacatcataggtaaatactcaccaaggtggaggacactgaagatctggtactttagatacatcattcctcaaaaagtttttaacggagaaagtggggcaattcaatgggggaaaggacggcctttttaacaaatggtgctggttctactgggtatctgcatccttgatacacagaagttaactcaagatggaccacagactcacatgtaagagctaaaataacattcttagaagaaatcatggaagtaaatcttcgtgaccttggattaggtaatgggtacttagataccacaccaaaagcacaagtgacaaaaactagatatattgaactacatcaaaattagaagcttttatgctgccaacaataccatcaaaagagtgaacagaatgggagaaaatatttgtaaatcatgtatctggtaaggttctagtatccagaatatatacgatttaaagaactagcctgggcaacatggtgaaacctcgtctctataaaaaatataaaaaaaattagctggtcttggtggtgtgagcctgtagtcccagctactcaggaggctaaggtgggaggagcacctgagcctggaaagttgaggctgcagtgagctgagatcatgccactgcactccagcctgggtgacagagcaaggctctgtctcaaaaataaataaaaaagaagagaaaaaaagtactattataatccaacaacaacaacaacaaaacatagttttaaaatgggcaaaggtaggctgaatgtggtggctaacacttgtaatcctggcacttttagaggttgaagcgggaggatcacttgagcccaggaatttgagaccatcctggcaacatcacaaagccccatctctacaaaaaattagctggtcatggtgccgcatgcctataatcccagctacgtgggaggctgaggtgggagaatcacttgaggtcgggaggttgaggctgcagtgagctgtgatcatgccactgcactccagtctgtacaacacagtgagatcctgtctcaaaaaaaaaaaaaaaaaaaaaaaaaagccaaaggtttggaatagacatttctccaaagaagatacacaaatggccaatacacacatggaaagatgttcaacttcattaactgtcagggaaacatagatcagaaccacgatgagctcccacttcttacccacagtgatggctatcataattttttaaaaaactagacagtaggccaggcacagtggctcacggctgtaatcccagcacttccggaggctgagccaggtggatcacggggtcaggagttcgagaccagcctgaccaacatggtgaaaccccgtctactaaaaatacaaaaattagccggacgaggtggcatatacctataatcccatctactcaggagggtgaggcaggagaatcacttgaacccttgaacctgcagccaagatcgtgccactgcactccagcctgggtgaaagagcaagactctgtctcaaaaaaaaaaaaaaaaaagtatactgacaaaccttgggaggctgaggcaggagaattgcttgaaacagttcagttgtgaactgctgggatgtatgtcacagctgatcaacatgtgaagatactggtacttgatagcctgttaaggaaaatttgcttccaaattttaagctggaaagtcactggaataactttaaaaaagaattacaatacctggctttttagattttctttacgtgtgttaagaattgtgtacaaattgaaatgtctgtactgatcctcaactaataaaatctcaattatgaatgaaaaaataagtagttttgcaggaggcctgatgtgggctggagtcactctgtgttctcctcctacagcagggcctcactctcctccccctcagcagccgactctccagttggggtcttctctgttggggattcagtgtccctgggataagaataacagtgccaaggttttgattcttgaaaggagcaatttagcttctcaccccctcctcattttagatgggaaccgtgagggccctgtcgtctacctggtgtccctgttgaagatctcatcctcattggaagactccttgtcatgcagcttcatggtttcttgtttttgtttgtttttttgagacagagttttgttcttgttgcccaggctggagtgcaatggtgcgatcttggctcactgcaacctccgcctcctgggttcaagcaattctcctgcctcagcctcccaggtagctgggattataggcctgcaccaccacacctagctaattttgtatttttagtagagacggggtttcgccatgttggtcaggctggtcttgaactcccaactgttacgtatgtccatgtgaggagagtccaccaacaggctttgtgtgagcaacaaggttgtttatttcacttgggtgcaagtggactgagtccacaaagagagtcagcaaagggagatggggtggagcagctttataggatttgggtaggtggtggaaaattacagttaaaggtagttatctcttgcagacagggcaggggtcacaaggtgcaggatggggagatcatgagactcattgtccaggggaggaatgtcacaaggccagttgattagttggggtggggcaggaacaaatcaccatggtggaatgtcatcagtgaaggcaggaactggctgtttcatttttttggtggttcttcagttgctccaggccacctggacgaatacctgcagatcacaggggttaacgatggcttagcttgggctcagcggcctgacattgaggatccttctttatctttttctgatgcccttctatgagaatgaatatgttttggaagaaaatgcaattaagattatccatcacaacaaccactatctccaaatctgtattcattgcttctattcattattcattataagtctcatctacctgatgaaataacttttttgaagataggaattgtatgctgtttaacagtgctttgattcttccacagttcagtcatccttgatatcttgcaggggattggttctaggataccgctgccacgccataccagaatctgtggatgctcagtcccttacatataatggtgcagtatttgcgtataaccaacacacatccccccatatactttattgacttagagacaagatcaccctctgttgctcagccggagtgcagtgtcacaatcacagctcactgcagcctcaacctcctgggttccagtgatccgcccacctcagcctcttgagtagctgggactacaggtgcataccaccacacctggctaattttaaaaaaatttttatttttagtaaagacaagttctcactatactgcccaggttggcctcccaaagtattgggattacaagggtgagccacggtacctggccccatgtactttaagtcatcactaataaaatgtatagatattgtacaatggtgacagttgttatgctgtcttttctatttgtatttttattgtttcttttttcaaatattcagcctcatctagttgaatctgaagatgtggacctgatgatgaagagggctgactgtatctaacttagggtcttgcatgcagctggcacttaatacattttattgactattttagctaacattcaacagacaattcctaataaaaaactcttaaaagtaggaaaaaaagtccttcctctaaagtggcaggaaaatcagcctaggcaacatagcgagaccttgtctctacaaaaaaaattttttttaattagctgcctgcttgtagtcccagccactcaggaagctgaggcaggaggatcccttaagcccaggagcttgaggttacaatgagctagatcacaccattgctctccagcctgggtgacaacaaggccctgagaaagaagaaaaaaaaagaaaaaggaaaggaaggaaagaatataagtattgaaaaggaagagacaaaactgattatttgcatatgaaatgataaatgtgagacagccaaggaagcctaagagaatcaactaagtttgtcttactggaagtaatatgagaattcaatacagtggctatataaaaatcaagacagcagcacacagacctcaactacttttcccatgtaccaccaataactaattagaaaatggaaggaagatcccatttacaatagcaatacaaatgtatggagtatttaggaacaaaaatgcaaagatcttttatctaacaaaaaatatataaaatctatatgatgaaaaccctaaaactcttctgaaagacattaaaaagaaatgagtacatgaggcagcacatttctagaatgttgtacagatgtcaattctcaaattagtctacaaatttaatgtaatcctattcaaatcctcagatagtttttggtggtggctgtttttgagacagggcctcgctctgttgcccaggctagagtgcagtggtatgactacagatcactgcatcctcgacctcccaggctcaagcaatcctcccacttcagcctctgaagtctctcatatggtgtccgagaaatggggacaaatctcacaaagggactaggctcaggagggctggaatattcagggaaggtttcaagcagaaagatgaacttgagttggcttttgagagattcataggattcccacaggcagagtgaaataagggaattttagatgaacaaacgcacagacaaaagcagaaatgcagatggtgtgactgggggatggtgaggggctgctctggctggaatggagggctggctgccacaatagtggaaatggtaaatgaggcaaataaggttggattggtaggatagcatcaaggttgccagcttattaaatcactcttccaatatgctagcactggcctattgggaaaagtaatgcatcatgtaatcaaacaaaaggcaaacagaggcaagctccaggaatgggcactgtaaacaggactcaccctagagtggccagatgtagactttagatatgttaatgcaggttgagcatctctaatccgagggggaatgtctcatatggtgtccaagaaatgggcacatctcacagagggcctagactcaggagggctacagtatgagacatttcccctcccttgtgaacttaaaaatgtggccaacaatttttttaaaagatggttaccctgcagtgctttaactggacctatttagacaacgccttacacactggagaaggatgatactttgtgactctaataaatctaccagacaatacttctctcttttggctgtctccttcctctccagggtgatgacaactccgtgagggtggagattatacatctctcatcatttcagcaacaaggaaataaattagtggcagagtaagggtgacttggtgagtacatccaattgttgacatagttttgggtgggagaaattttgctattatatcaacttcttaaaatggtctagtgggattaactttgtttcaattcacagagatctcttggaagcgaggatcctttaaaaatcctggaatatacactgcagtaaaagaacaaagcatacctcagccttaaacgactgaagaagaatgtcaagtggggaagtggctttggttttcagtttgtgggttctgaatccacacaaagacaggattgctttctgaaaacctgaattaattattgtccttacctcaataagacaaaaaattagaatcaaaatcgttagtattacagtcacagatatcaccaagattagtttgttgttatagccatatcctggaacttctttcgtgagctaaaaaaaaaaaaaaagaaaaaaggaaagaacaattaaaaaaagagtgaaagctaacttttcaaaaccccagtattctagttgagtagcttacaggttcttttttttttttttttgagacagggtctcactctgtcacccaggctggagtacagtggtgtgatcacagttcactgcagactcgacctccctgggctcaggtgatcctcccacctcagcctctagagtagctggaattataggcacaagtcaccacacccaactaatttttgtattttttgtgaagatagggtttcactatattggtcaagctggtctcaaactcctctgacttcaagtgatctacccacctcggcctcccaaagtgctgggtttacaggcgtgagctaccatgcccagcctacagttcatcctgtgcactaatctgtttcactctctaaatgaacaaagtgggagatcactgtcatggccaaagttacatggccaagacaaactatggcctgggagtcccaggttctcctgtgtgggcactttcctggcatatgctaaatgatgggaaagtctgggtctcatgtttctgtgtggtcctcacctcactcgacttctgctctttctgttcactctgggcttctgtgctttcattaatatagttcttagttttccactggtctgtatcccattctgccttggacgcctttacttcctgctgctcactgagaagcctcatcaggaggcctgtcctggagatgagcttggcacaggtcacttgcacataggtctcggagcagtccgtcttcaaggtccagataacatgagaaatgaagcttctcacatcgttgttggggatgacggactgtagttgatgggttagcggaatttcaaactgatcacctggggatgagagcaatgggtaactgaagcttttgggctcgggggacaggtcagtgcccacgttgttgtattcccattttgtctcagtttgtttaacagttggctctaagttgaatgcagtcctagtgggaatctgcctcaggaagatgattgtagtttgtgttttcagagatggtgccttctggcatagtagtgttttccataaaaacgttttcttcagaggcatttcttgcagttgtgttttttacagtagtgttttctataaaacattctgaaggagcaaatacttctggaaaagggttttcttgaggactcaggtctcctgaggatgaaaaagccccttgtgaaggggaatttatgaggctcttcactgcagagaacggcggcctctttgcgagcatcagtctattgagataacttttctttctcaattttctaatctttttggccttgggtgttctgtgggccacacgggagtgagttttatgaaagtggtatttttttctggaatgtactactcgtttagcagccttcatattttttaactctagcctttgcattttctaaaattaaaatggtgtaggctaagtctttcaatctgtctatgacctgaggtagggcttttgcagttgtggaaggcagaaggcatgcccatggagaagggtttcagcaaagaggagactgttggcttctgctcttgggtgaatgaaggcttggtgtagacggcgtttcccgctacgttctcgggcccctgcactatgtgaggctattccagctcccttggggctggactcccgagccttttttctttggcagcattctccccaaatgcctgggcaccctgttccctcctgatactctgctttcccaccgctttgaagggccttttctggatgctccttgggcccatgaggactctgttcactctctgcaggtttttgcctacactttgaacctttgccaggctgttttcctgtggttggacagtttctaatttcttttcaaatatttggcatttaaatttgttacctagaaggctggactgcataagcatggcagttttttcttcccttttaacttcatcgatttttttcttgtatttctgcatctaacatcttttctagcaaatacacctttctcaatttattttcataagttgaattgttggatgcaggttgaaacaaggggctctttgtattgtttttcaaaacaggagcttatctccatcttgcacatttgaaaaaagcagtttaatgaatggtaacaacattgattccgcatctagatttcctgctgagaaataaggcaagatgtaatttagcgcagtgataacatcactcttatcataagtgtctagctgctcactcccaaagactgacaagttgatgccactgctgtctgaggctgcctccggctcagtagtcagctcaatgctcatgtgcttcttctgggcttgtaacaccttcatgaacactctttctggattccctacagatgcttcttcacctgtcaaaaaaaagagactgctttgatcatgaaagataatggaacggcatgcatcagtccacagctgtatgccccagtcacacaaagtaggagtcagcaaacattagagtgccattcagagaggagaaacacacacccaagcctaaatctatgaaatggcaacaacaaaaggaggaaaagacatcttttgaaaatatggctacttacttggaacattcctagtgtgacatagagtaactctgcttaggattatttcgttgatccccaggggccaattgcccagtgctcagtcaaagcccaaggtggaagacaagtgcttccctgatgagctgtcctctctgcagactgctccgtaccctgtgctgtcctgcctcagatgcagagagagcacaagcctccctcctcatcctcagtgtgcctgtgttcttactaccatcacagctgaatgcaatgaaaggctatcctctgagaggagcagggtggagatgctaaagtggaggccccctcccattgctgatagatcctcatctggcatgcactccacccacccaccccattctctgctaccacatatcgtagccccattaaagaagaagtgacatggaaaaaacactgtgcccaccctagtccttttcttaaatttgggcagagatccagggtataggttaagagatttttaatttgccagatggtatgcctatgttgttaaatatacaatgaatctatggtatgatagcagtttctggataaacattacttgaggtcctaaaatgcagaagggaaaaagcagcttttgtcagatgcttactttgctttcatttcatctctaatattttggatggggaaccatccaaagcttctggccgcatgaaggtcaagtgtgccagtgtgcagctgggtttcttttccagaattaaaagtattttgggtggtgctgagggtcagaggaagaagtaaaaattgtgagaaaggagaaacatgggcttggggagaacccagaattggggacagaagacctggcactaagctatagcacttagcacctctgatcttgtttttcctcgtccgtaaaaggagattaacaatgcttttctgcccacctcttggggagaagggaataatttagttggtaaaaaaaaaacttttgaataataagcaactctgtctttatataagtagccaagcattattaattatccaccccatatcactggtagatacctgtattcaagctatgtggacataaaagcagtcacattttagaagtcatgaagttggtgctaataaacctaatctacagaaaaactcttgaaagcacttgagcatttgttctgtgaatagaaaggtttgagattcagagcaagttcagagttggatggtctaagaatggaaaagccctccattccattagaagagccagggagcaatttctggttatggaaccagaagctctcaggcttcaaataaaacagcatcacttgtactcttataaaattgtaaaaacaaaaacaaaactggatctacatttgtcctaaaaggcagagagtacttgagacctcatgcatataaaaccagcttacaaactacatcgcactatatgaagaaattatcactgggggcaaatcaccaagtagggagcacaatacacagggtgtggatgttaatgtcattccctagccttctcattcccttctcttggtcctttatgcatatggaacagttccattattaaattttgtaataataactgagaacctgactcccagcaagggagtagttcagaagttgagggagtttaaatctgaatgagtaaataaagcaattatatcattagcttaaaattttatcatcaattaaaaataaatttaaaaacaaatacttaaaataatgtaacaatttatcaccaggcaatttggactcacgacaatgtgtggtgtttgtcagacatgcactgttgcaatgcagcttgactgtcttgcagacagcctcaatgctatttttaaattggcagaggcagcaggccatatggctaggtaagatcctataagatgaaaacacaaaacaataaatagtggtaaagcagttacttgagtaggcaaaggaggcaggccaacgctaccacagggctgggcagaaaggtgttactgaggcctgtggactggacagttgggtaggaaccagaagggcaatgggaaggaggacaaaggtgcccaactgaagggtaagcatggcagtgagtatggtatgcctagaataaaagtggttgggattagaattgggtgacactgatcagtagtttaattcagaagtatctcttcccaactcaaaagtctcactttgggctgaaagtacacaggaagaaagtagacttctaagaagagtctgaataagcccccaacttctggagtccctttctcaatttctgttggcagtgggaaatattagaaattactctgggcattaaaaatagctcagtttaacctggattgtggggttaaaaaaataacagattgcattggccaaatctcgacaatttgagcattcaaaagagtaacaataagctacaacataattaatatataaaaaagaatccatgaagaatgatatttaaaaagagagggagttgttctttaatgaaataatgccagctaatgaatgtagaaggaatgacagaattttaaaaagtgttactttgcaaccaccaatgtaataaaaattgattcagacaaggattgtcattgatggacacagctgggtgagaagacatttgagaacaggatctttactgatctcaaagtaccaccacacagatattttattaattaccaaagggaaaaattattttttatttttttatgagacaaagtctcactctgtcacccaggctgaaatacagtggcaaaatcgtagctcacaacagcctcgacccccaccctgggctcaagtgagtctccaaattcagccccccaagtatatgggactatagtcttgtaccaccacacccagctaatttttttttttttttttttttttttttgtatttttagtagagacagggtttcaccttgttgctcaggctggtctaaaactcctggactcaagcgatctgcccgtctcggccttccaaagtgctgggattataagcatgagccaccacacccagcaaaataactacaatggagagatctggaagatcaccttaaacaagtgatcaaacttagcattatgagccacctgcaatcacgaggcaggaaggatatatcacctatgcagtatttttcccaaaaatgcttaccttgaatctcatcatgtggaaacagacaaatccagattatgggacaatttacaaaacaactatctttgactcttaaaaaatgccatgtcatgaaagatcaaaaaaagtagaggaatgttttagattaaaggaaatgaagacatgacatgcagtgcctaatctttgattggattctgtgctattctttcatctttctggtatgtttgaattttttttgaaatataaacttgggcaaaagagataaccaagataattgattaatttattgttatggctcattgggggcagtttcagagaaataaaaacaatctttgtaactggagtaaattctcaaggttaatcttaagcaatatagcatggtcattaagaatacagattccacagccagactaggcttaaatcccagctctgtgaataatgtgaatttgggcacattgattaatctctgttccttggccttgtcattataatagtacctacctctaatgagttttgaggattagatgaatcagtacctgaaaaatgcctgacacacagtgagtgctcaataaatgttaactactgtaattattacattacagaggttgtgggggggccttttctgagtcctccaaaaggatgactttattagggccacattaagactgtggaaacagaagagtattcaacagataaatgaagtctatgagttgggggtacaatttatggagttttagattaaaactgcatccaataagttggtctgacacatctttcaaacctatagaggaataatcacaagtgactagtattcctttgggtccaatagaggtctctgatcttcatacagattgaatgtacccagaaccgtaacctagcattttacttatatagcaaccttaactctgacacaaaagtgtttcttttgttttgaggccaagtctcactctgttacacaggctgagtgcagtggtgcaatctcacttcactgcagcctctgcctcctgggctcaaatgatcctcccacctcagcctcctgagtagctagaactacaggtgagtgccaccatgcctggctcatttttgtattttttgtagagatggggtttcaccatgttgcccaggctggtctcaaactcctgagctcaagcaaccctctctccttggcctcccaaagtgctgggattacaggcatgagcctgaagtttaattgttattcttttcctgcccccgacttttgattttaaacattttctttttttcctttaagccttaggatggctaggaagcattttcagatggtataatgaacacctgtataactttcatctggaatcaacagttgctaatactttgccacatttgctttccatgtgtgtatgtctatacattttctggacaaaccatttgagagtcagttgcagacaaaatgaccctttgccattaaagacttcagtgtgcagcccctaagaagcaaggcattctcctgcataaccagaggactatcatcacccaatggaacttcatattatcattgtctactatgcagcccatatacacattttcacaattgtcccaatcataacatggcttaaaaaattcagaatccaatccaacatcagacattgcatttagcgttcatgatttttttttttttttttgtagaaagacctttaatacttctgtttacaaaattcaggcatacatttcagtttgccctgaaccgtgcccaaggctgtgtgctcatctctgccaggatgtctgtgccctcatgtactgctgacgtggagggtgcagagcagagcctggggtctggaggcttcgctgggcctcagggggaggggaatgtgaatgtggcccggcccagaggaccctccatttcatcagttttggattgggcaacagaggaagcagatgtctgggctgcagacctgctggtctgggcaggggtttgggaaccccggggttgcctgccatggtctagaggagatggctgcggctacttcccacagggtggggtggccactaggggcttgaagatttgctcactggagcctttgtgcttggccctcagcagcacagctggggctgtggtcccgtgcaaggtgtgctgagggttgtgtaggtggctggtggtggcagcttgtgccagagtgacacaggcttctgtgggcctggctgggggcagttaaaaagccgaaaaggtacttggctttgtgagggcaaggcttgggaggcggggccctgcaggacgtcatgttctctgtcctggttaggaggggggaggtgttgggggggggaaggtggggcagatcccaactggcccctgtccctgggctgcaagctgacagcaggccagggaagcagtgaggccttctgccctggccttggggagaaggagtgcatgtgtgaggctgggatacagtggccctggagtggggctagggctcatcgccagcaccaggcgcggggaggatttaaaaccagagtcctgtctctgagccaccccacagggacgcttgatccaagcctgttaaggccgtggaactcgagggtaggcagtgggctgggccaccgtgggttcaggatggaggtgtgggggctgccctggaggaacgttagtgtttctgagagcaccttagtgttgctctgcctcagccagctgggcaaggagttggggagcggggaggaggccggcgccatggagtggggaagggagccgtcactgttggggatcagccgctagtgtaaacgagcatctccacccacccagataagccccccacccaagtgtggagccctgctcagggagtacctcaagggccccggcctgggtggcgccagcaggcttggacactgccctggcagcaggggccccgtggaaggcaggatacccagcagggggtgccacccagtgtggatggaggggcagggcgggggcgcccctgagtcactgggcagaggcacgagcacgtccacatagctgagcaggaagaagcccgactggccgtccagcatgccctcgtatcagttctcgttcatctggttgatcagcatgaagacatcgccctcatggaagcccagctccctatctttctccggctccaagtcatacagcccttgcagctcggctggtctaggggcggcatgctcctgctaggagtccagatggacttgtcgtaagatcggaaagaggacgaagctgcgatcttggggactgtggtgcaggggaagccccggttggactgctcaggctttccgaggtcaaagcactcccggggcttgggcttatactcccgcctgggtcgtgaggaagcttcccggatcctgcacttgaacttctgggccagctggtccaggatctgcacggcctgccggtggtagtccagctgcgcctctgccaaggccgggagttgactcacctactggatgtcggtctccaggaggttgtgcatgctggtttctgccacctccttggactcctcaaacttctccagcgcctggtgcagctcctcttcggggatcttgccctgccgcttcttttagtcaaagtccaggcggcggccctccagcttctgcaggtggtgctggatctccttcaggtctttctcacataggttctggagggggtcaatgaagttatgcttgacctctatgtccagggagtccttcacctctgccaggtgcttcatgggctcgccggcatccagcagtgcatcgctgaagttggactcgtcgcgcagctccttcccatggcggatcaggcactcgcccaggagcccccctgactgcaggtagccggggttcttcacctggccccggatcttgcacgcggtgttgagcatggtcagtttagcctgcgaggctgggttgggctgcgggtactcgatggtcctggacagtacttacgtcaccgccttgctgatgacatccaccttctccatctcttcgaagtcatcatccagcttggtcccctcagcccctccgaccttctcactgaccagttggctcgccttgtagaactgcttcttcagcccggcaaccgacatgctgcctcctgccgcggaaccttccgcccagacccccctgcccagaccccgccagcgacaggctcccgggcaccaccaaccctctgcgcgcctcagcggcccccatcagcaccgcctccaccacccgcttgccagctcggcgcccgccccggcgccgcctcgagttcatgattctttagtctccttcaatctagatctgttcccaggattgtttaaaagcatactgacaaacctttgagactgtaaatgacctgaggtatacattatctttacttgagaatagtaatttttcaatatgcattaaagatcattacacatgagctaagacaaatgagctggtctacttactttgtatataaatgtgtaaactcctgaagacttccaataatgaactccaataaggcaattagttcaatgtctttatggccttggcgacaaatggttacagacaatgagagcatttttcctatacactaatggtcaagaaaaaagcagacagatcctcactatcttagagaactaagtgagaaagctggtcagtgaagaggacttcatccagagaggaagggatctagctgacagaaagatgctgcaggaggctgaggaaagtgagcctagagcagtaaaacagatctaacaacgtggtgaaggtaagaaagtgacctgacaaaaatgaatggagcagagtactaaatgaagggctaatcttgtataatgccctcaaccagccttagcataactgagtttctatttagcttgcatattgtggggggatgggggtggtggtggcacaatttaagttgcagtaagttgtgtaacaaactcccaatagggccctggagaaatacatatatatatatatatatattttttttttagacagggtcttgctctgtcacccaggctggagtgcagtggtgccatcttggctcactgcaacctctacctcttggattcaagcaatcctcctgcctcattctcccagagtgctgggactacaggcatgtgccaccacacttggcgaagatatagatatatatatatatatagatacatatatatctatagctacatctacaaagaagcaggcatggtgcctcatgcctgtaatcccagcactctgggagaatgaggcagggggatcacttgaagccaggagtttgaaaccagcctgggcaacacagtgagacctcgtttctccaaaaaataaaattgaaaaaaaaaaaaactcacaccatataaattaactcaaaatggatcatagacctaaatgatgtaactatacaatttctgggagaagacatagagagtaaatcttttctactttggattaaacaacaggttcttaaagatttctttaggtaagaaacaaaaaagcacaagccatataagaaaaaattgctaacttaaagctgatcaaaattaaaaacgtctgctcttcagaaaacatttatttatttatttattgagacagagtctcactgtgtcacccaggctggagtgcagtggtgcagtcacatctcagtgcaacctccacctcccaggttcaagcacttcttgtgcctcagcctctggagtagctgggattacaggcgtgggccaccacacctggctaacttgtgtatttttagtagagatgggggttttgccacgttggccaggctgatctcgaactccttacttcaagtgatccacctgccttggcctcccaaagtgctgggattagaggtgtgagtcactgtgtccagccagaaaacacttttaacagaatgaaaagacaaaccacaaccagagagaagatatttaccaaacacatatctataaggccttgttttttgtttttatttatttacgtatttaatttttgagatagcatctcactctgtgacccaggctggactgcagtggtgatcatagctcactgcagcctcgacctcccaggctcaagcaatcctcccacctcagtttcccaagtagctgggaccacaggtgagcaccaccacacctggctaatttttatatttttggtagagacaaggttttaccatattgcccaggtggtctaaaactcctggcctcaagcagtcctcctgcctcagcctcccaatgtgctgggattataggcatgagctactgtacctagtccctgaaaagacttgtatctagaatctataaagcagtcttttttttttttttttttttttagacggagtctcactctgtcgcccaggctggagtgcagtggcgtgatctctgctcactgcaagctccgccccctcggttcacgccattctcctacctcagcctcccgagtagctgggactataggtgcccgccactatgcccggctaatttttttttttttttttttttatttactggagacgtggtttcaccatgtcagccaggatggtcttgatctcctgacctcgtgatccacccgccttggcctcccaaagtgctaggattacaggcatgagccaccacgcctggcctaaagcactcttaaaactcaataatgacgaatgtctcacgggattacagggaaaaaaacctcaataaaaatattaatatccaattaaaatatgcgaatagatttgaacaatttagtaaagatatttgcacatgaatattgtatatcactagctattaaagaaatgcaaattaaaaccagaatgagattccactacacatctagcagtagaaaggtgaatatttctttaaaaactcaaatataagaatctgctgggctgggccaggcatggtggctcacgcctgtaatcccagcactttgggaggctaaggcgggtggatcaagtgaggccaggagttcgagaccagcctagccaacaagatgaaaccccatctctactaaaaatacaaaaattagctgggcgtggtggtgcgcagctataatcccagttactcaggaggctgagggaggagaatcgcttgaacctggtaggcagaggttgctgtcagctgagatcttgctgctgcactccagcaatgactctgtctcagaaaaaaaaaaaaaaaagaaaaatctgctgggccaggcatggtggctcacgcctataattccagcactttgggaggctaggcaggtggatcaaatgaagtcaggagttcaagaccagcctggcgaacatggtgaaagcccgtctctactaaaaatacaaaaattagctgggtgtggtggcaggtgcctatagctatttgggaggctgaggcaggagaactgtttgaactcaggaggtagaggttgcagtgagccaagatggcaccactgcactccagcctggggacagagcaagactgtgtcgccaaaaaaaaaaaaaaaaaaaaaaaaaaaaaatgctgaggatgtggaataactgtgactctcatacaatgctggtggaaatgtaaaatggcacagccactttaggaaacagtttagcagtttcttaaaaagttaaatatacactaagcatgtgaaccatccaactcctggtatttacccaaagaaatgaaaacataggttcacacaaagacctgtatatgagtgtttttagaagttttattcaaaattgccaaaaactggaagctacccaaatgtccatacattgatgaatggataaacacattgatacgtccacacaactgaaatactactgagcaataaaaaggagtgaacagttgtccttcggtgtctgcaggggattggctccaggaccccctgcggataccaaagtccacagatgctgaagtcttttatatgaaatgacataatacttgatataataaatgacataagcctcgggtatactttaaatacctaatacagtgtaaatggtatgtaaataattataccataaattttctattgtttttattgttgtattattattttacatatttttattttttcccaaatattctccatccattgttagttgaatccatggatgaggaacctgcagatatggaggtgcaacaacatggatggtagcataatctcaaaaaaattatgctaagtgaggctgggtaaggtggctcacacctgtaatcctaacactttgggaggccgaggtgggcggatcacttgaggtcaggagttcgaaaccagtctggccaacatggtgaaacttcgtctccactaaaagtacaaaaatttgctgggcgtggtggcacacgcctgtaatcccagctacttgggaggctgaggcaggagaattgcttgaacctgggaggtggaggttgcagtgagctgaggtcacgccgctgcactgcagcctgggtgacagtgagactccatcttataaaaaaaaaaaaaaaaaaaaaaaaagcagtactaagtgaaagaagccaaacacaagaggctacatgctacatgatttcatttataagacattctgaaaaacgcaaaactataggaacagaaatcagattagtagctaacaggggctgatggtgggaggaggggattgcctacaaagggacacgaggggcctttttgaggtgacagaaatgctttatattgggaatgtggtggtggttatgtaactatacatttgtcaaaactcatcaaagtagcgccgggcgtggtggctcatgcctgtaatcccagcactttgggaggctgaggcgggcagatcacgaggtcaggagatcgagaccatcctggctaacacggtgaaaccccgtctccactaaaaatacaaaaaattagccgggtgtggtggtggacacctgtagacccagctactcgggaggctgaggcaagagaatggcgtgaacccaggaggcggagcttgcagtgagccaagattgcgccactgcactccagcctgggtgacagagtgagacgccatctcaaaaaaacccaaacaaaaacactaatcaaactatacacttataaagggtgaatgttatgtgaaaattatatctcaataaacctgacttaagaaaataataaaacaaacctaaaaaaccaactaagtaaaaataaatctaagaaaaaaataacttacagtttttccaattcaacagtcatcctgagaatgttcttaattgttgtaagtgggacttgtgttgttcccatgtatctgaagaagaaagccgaaacattcatgatatgaagcccaataccaaaattctgtccttaaaaagatatttcaaggacatgtgactacttcaattttggcttctctataaaacaagccagttcaacagtttatttgctgtaaaattccagagagctcttattaaagaaatttaagttgatctgcatcatcaaatttaatgatacttaagagtagaacttacacttattttttaccattatcttctcatttcatattgcattcacccattttgattatttactcttttcttcctttttagaataatgaacacctattcctctttgctttcttggttaagtagtattcctccatatgtctacatgttccaaatctatacaggtttttcaacacggttctcttcctctgctgctgctggctgtcttgaccattacacatcttttcttaatccttttctttgccaataacttttttcaataactcagttaaaatttatgactttttagcctaaatgcaaaatacttaatctttgatgacaaatttaaaagagcataagtcatctcatgactcatgagagtactatagtacttacagatatattaatgccggcagttccaagagctacggatcttcaacagctgtcagaggattgtgattgagaattctgataaaaatgcaatgaaattaaaattacctgcattttcaatgtgtgaaactgcatcaaaagcttatattcattttttgttatggaacttttaggttaaaaaaatcattttctgtttttacctaataaatcaccattagaatctgtaaagcactattcctttgggaactacctaggtctctagaagatagaggagagaaagaggggaagaaatagaaaaaaaaaaaacaagcggatagcaaagaaaaaatatgctgcagaacttttcaggtcaaaaaccctagaagtgactatgttggtaggaagccctgactctgcaggaaacactatatctagtgtcctccataattcaagttgctcgggttttttttgtttttgttttttgagatggagtcttgctctgtcgcccaggctggagagcaatggctctatctcggctcactgcaacctccacctcctgggttcaagcgattctcctgcctcagcctcctgagtagctgggattacaggtgcctgccaccacgcccagctaatttttgtatttttagtacagacggggttttgtcatgttggacaggctggtctcaaactcctaacctcaggtgatccatcccccttggcctaccaaagtgttaagattacaggcgtgagccactgcacctgactgcttgccttttatcttcataaagtttttaaattttatggtttaatttgcacagttaaggaaaaaaaaaataggaccaattcttttgctttatagccaaagtaaaagggataaatctaagaggaggaactggtcaaaaccatactcctatcacatactctcacttgtcttcttgtatgacatcacagcctttgttacattgcatataatcatctgtctacttgtcagtctcctgggctatcagctccttgagggcagagaccacatcttatcgtcattgtcatccctgtgactggcatcatgtctgaaatttactagggatttaataaatgtttattgaataaacaaatgacattttgtttatatgtcaataaatgaataaattcattttgatgtgaatttttattccaaaatgctggaatctattttctttttaattctttaaagtgaatgagaaaaagaaaagaaacaggaagaaataaaagaaaaccaccctttaggttaacccaagaatcactgtacttttgcagaaattataaaaataataattattacagtgagtttctattgggctgctaggtatttgtgatcagcatttcacatttaatcctcacaataaccttatgtggtagatattattgccctattttataaatgaggaaactgaggcacagagaggtaacataacttgtcctaggtcaccaagctattaagaaacaaagctgtaatctgaactcatgtgcttaatctgtatgaagaaaaagggtttactttaaccttatggttttttaaatttttcttttctttctctttctttcatttcccttcctccctctttctttcccttcccttccttccctccctccttgtcctccctccctccctcccttcctcccttccttcttttaagttaaagtttccgtttattggctgggcctggtggctaaggcctataatcccagcactttgggaagctcaggtgggtggatcatctgaggtcaggagttccagaccagcctgaggtcaggctgagccagaccccatctccgtcggaatcttgctctgtcacccaggcttgagtgcaatggcatgaccttggctcactgcaacctctgcctcctgggttcaagtgattctcctgcctcagcctcctgagtagctaggattacatgtgcccgccaccacgcccagctaatttttgtatttttagtagagacggggtttcaccatgttagtcaggctggtcttgaactcctgacttcatgtgatccgctcacctcagccttcagaagtgctggaattacaggcatgagccactgctcctggctgccagattcttttgagggactcccggtgtataaagtgtttagtaaaggtggtgaatttaagacatttgtattgatgctacctaaacctcttgatggagggacctaatgagcctgttctctggtgtgagagcaaatgaaaaacagaccctcagtgccccttccctaagttaagcatcagcaaattaatgaggacagagaggagcatctgcagaaactgctgctctagtccagacacatcctgaacgcctccctctacctcaaaatgaactgtgtgaaactagatttctgaaccacaagagaagtggaaagtcttttctaaagtcagatgtggaggagaatcttcaccttgagtctaaactccccttcaggcgattgaatatacccactctgatttgctgggtatgttatacagagaaatcatagaattcttgcacttatggtagaagagtagtcaggaatgtatatggaattaaaatagagcgatgtattttcttcacaaaattttttcttttttttggcacaattgcttaatataaacactatcttggccaggcatggtggctcacacctgtaactccagcactttgggaggctgagatgggtggatcacctgaggtcacaggagttcgagaccagcctggagggaaggttggagtgcagtggcacaatcttggctcactgcaacttccacctcccgggttcaagccattcttgtgcctcagcctttcaatagctgggatcacaggcacctgccaccacgacctgctaatttttgtatctttagtagagacgggatttcaccatgttggccaggctggtctcaaactcctgacctcaagtgatcctcccatcttggcctcccaaggtgctgggattacaggcgtgagccaccacgcctggccctacactttggatttaactttgattcctgctcatatgcagagtttataactgcttaaatgtctgcaacatttagctgcaaggaagaaagcttaacacaaagtcccccagggagcaaaaaactgcaccgccacaaccagctaatttttttgcatttttagtagggacagggtttcactatgttggccaggctggtgttgaactcctgacctcaggtgatccacccgcctcggctcccaaagttctgtgattacaggcctgagccaccccacccaggaataagactaatttgggggtcacttgtttgatgccttttcttgcccatgccataggtcagaactaggacaagcagagcaggtcatatataagctatgtaagtctcttggcctctttgtaccttagtttccccatttgaaaaaaacaaatggatcttaagacatacttttcagagttcataatgggcttatacccagctaaccaataattgtatgagtttttatacataaatagatgtttacacttattcatcttctatttcacttacaacttgtgtaaaaactgcattctgtgccaggcctgagatgttccaaagctcagttctgttagtaaattgcaaccaagatttctacaaaaaaaaaaaaaacataagccaaaggaaaaaaaaattatttcagagcatttatcatttgctgtgagtctaatttatataggatggaacgtaacgtcaatcctttctctaagcactaaagaaatctccctgtggaagatactggcttatgatttataatttaacattgcatatgtggtgcattagatacaaaacagtgaatgctcagtaaatatctgtgctaagtgatctttatttctctagaacaggatttcacaacttcagtgccatcaacattttggactctataattctttgccatggaggtttgtcttataccttggaggatgtttagcagcatctctggcctctgcccaccagatgccaggagcacacccacagttttatcaaccagaactgtctctggacattaccaaatgtcacctgagtacaaaatcacatcagttgagaaccactgctctctgatgattcactatgatctgtgtaataattctcacactaatccttgctagagacaaaaacagtttgctatataattttagttcctttctactggtcaaattttaatcatttcaaaatgaatagcaaagaggtttataattaagttttataaaaattccaaatgcaataaagttatatttgtaacttacataaactgcaaaaatggtaggggttcaaatgtatgtctttcaatagactgtattttattgcaggataaatctctaggaaaaggaaaatattgccttgataagttattagatgtcgattagtatgaataatagagtttagaataatattgaatacacatttttcaactctaaacgtttggacttgtatttgaactttccagagccctaaccctgcccatacctctcctagagtcttaccttcatagttttaataaataaaatatacaacttaatagactttggaattaatttttcctgagagcagtagacttgattagatgcccttttgtagtctcatcaaatcctagattatgagctcaaagttttgatctctatatatagtttctaatattaaaacaaatagcctcacatttatacaccttcctagttcaggtctgttttcctaagccagttcaggatcagaagaaataaaagacatcctttcacagcatttgaaaggaagttgcccctttacctaatacataactttgaactaattcaaatcatattaatataattaatttatatcatattaatataaattcatttttggttttatattgctttaatatttcatgaaagcgatttcttcagttatacagtgatggggcttgttgtccctccctctttacctggatggtgttacgttgtctggctggtgtctccatctctagtctctcccttcctaaactatcctgcacacagtcatcatataaactctccagaagtgtcttctttgggggcaattaaaattttatatctacatagtctacatagtcttcaccccaataattccatttctagatatctattccacaggaatacttgcccatattcacaaagaagcatgtacggggatttcattgcagcaacgcatgtaacaagaaaactaagcctaatctaacaattcatcaatgggggaattattaaataaactacagtgcatccataccgtggattatgcaggagtttaaatgaatggggtgaccctctaagtactgggaaggaaataaatcatgaagtgaaagaatatcatgtcatacaataagtgatactgtatatgatatcatataggtgatacacttgtcaaattagatatataaccatgaagtaaaagaatcaagttgcaagaagttaccatttaggtaaagaaaaaagattttaaaaaccacacaacaaatctattttgccttatgtaaatatgtatgtaggcaaatgggaaaaagtctggaagcatgtatactaaatgcagagcagcattacctcagggatgagggagtaggacacaaggagggtttttgttatacctgtttttgcatttttatacattaaaaatagaatcatggcctgggggtggtggctcatgcctgtaatatgagcacttcaggaggccaaggtgggaggatcacttgagctcaggagttcaggaccagcctaaatggcataggaagaccctgtctctacaaaaaatacaaaatgaggtgggcgtggtggcatgcacctgtggtcccagctacttgggaggctgaggtgggaggatcacttgtgcctgggaggtgaaggctgcagtgagctgtgattgtgccactgcactccagcctgggggacaaagtaagaccctgtctcttaaaaaacaaaagagagaaaaaagagaatataaccacgtattatttctgtgataaaaaataaatttaaattgcctcttattttaaagagagcctaccaaatttaattttaaaataaccataggatcgcaatcaacagaggttgatttgggatatggaggagaaatatcttttctcagaggtaccgacctcaaaattctggaccaagaaggatcttacaatgcagttagttttttgtcacatttggagagaatatactcacagtttcttggtccaactgtatgctttccatacatttccatcaatgtaggaaatatagtttccttggtaacttctgtgaagaaacacagtttatatccttgaataggtaggaaaagaatgaacaggataagtaaaagaatcatggcaaccttgtcggggatattcagaaacagaaaataacacctgctttctcacttccagagctattagcttcccagtttgcacagttcatcaagaagtaatgccgggccactggcacaaatgatgaggcatctcctggaagcttaacttcctatccatcccatctcttggacagacgatgccagttaattactttgaatgtaaggcctttatccaaaagcacttatgtgtctaaactaactccttctacacataaaaaatggtaaatacttcaacagaaaaatgggcaaaagcttatcattatcaataaataagtagaaagaaaccctatgccaggtgacaccaaagctttgccctctgttgaaacatcctaggctttttctttccattcttattacaactgatctgatttagccccttcacaccttactcctacattttgctattcctttctattttgtctccctgaaataagattttccctttgagcactctacatatggattctaaaataatcctttgcatgtttacacttgaacataaagcaaaaacaaaacaaaatgaaagaatccttttgttttaatcatttaatctctcttgcttggaaactttcaatggctttccataccccattttgtagctttcaaactcctatagctgatagtcaagattttacataatcatatcttcattgctccctcacctaattctttgcagccagattggtctactaaattccaaccatacctgtagccatgcctttgcctagactgtactcccatttttttttctatttaacaaattataactactctttaagaccccagtaaagttttagcttatccatgtagctttccctggtctccacacctcagggatcacagattctggtaaattatagcaccaatggtctgcattatcttttagtaattaattatatatacctccctttttatgcctattctctttcttccctcctatcattttcgtgttctggagacagtagcatacttggccctaggtgtgacacaaaatgagtgctacatatagaaagccagggacaaagatgagttctggacataactaaaggactgagtaatcatgttaacagtcaacacatcctacatatgctaggcactgatgaagtgtttcatatattcactcacctaaatttcacaacaatcctatgaaatggtaactagcataatcctcagtttaaaggtgaggaaattgagtcacagagcagaataacttgctctgggtcaccaagctaataaatgacagacctgggttcaaacccaggcagcctggcgccagaataaactcttaaccacttacagcatcatcactgacatgcggagagggacaggctgctgtaaagggagtgaagggaaaatgggaggagagcagcggttaagcaatgatgtgatggggctaaataaaaatgaataagacatgagtaaaagactggagtaaaaggaaaagactggagaaagggcctaacagtaaaggaaaatgaagagaagggagagttgacaagcaaaggtgaaagcagaaagtcagttgtcaatatggcttagggagataaagaaggcccaggaaggcctccaggaaaaggctgccatgtcaggcaggacacagaggacagttgaggaaatgtgattcttacaagatggggaaggtgccattgtgggtgttgggctgtggcacaggcacttggcggaacctctgctttggactgagatcaatacaaggcagcgtctcatatctgcaggtacagagcttacatatgttggtgcttgtggaggccttctgttcctctggtgcagttaaagccttattttggggtaactttcagactgcaccaatgaatcctgagcaggttctagttcagtaggtggacctgtgacttcagtcaggcttcgatgcagagtctgaacctggtctggatgaggagctgtagtcttctccagggcggtagatgtccagtctctgtagtgggttctggagtgatggaagccccaggtctggaggctgagttgatgtctcctccatggttgaagatggtttaacccctgtagtaagttgtgtagttatggtaagctccaggtccagaggttggactgtgacttgagtcaggtttgaatgctgaacctgacccttgtctgaaggtggaagtgtcacctcagagtgttttggaggaggagttgtagtcagggctgtagaaggttcaaactctgtcgtggattctggagtgatggtaagtcccaggtccaaaggttgaactgtggcttgagtcaggtgtgaatgctgagcctgaacctggtctggatgtggaagtgtcaccttagggtgctttggcagaactatagtcttcttcaggggtgtagaatgttcaacctccatagtgggttctggagtgatggtaagtcccaggtccacaggttgaactatgacactgggtgatatttgatgctgagcttgatcctgacctggtgttggaattgttacctcttgatatactggaagttggggtacaactttcttaggaggctgagttggggtctcctgcgtggttggagaaagttcaacctccgtagtggattctggagtgatggtaagccccaggtccacaggttgaactgtggcttgagtcaggtgtaaatgctgaatctgaacctggtctggatgtggaagtgtcaccttagggtgctttggaggaactatagccttcttcagggctgtagaatgttcaacctccttagtgggttctggagtaatggtaagtcccaggtccaaaggttgaactgtgacactgggcaatgtccaatgctgagcttgatcctgacctggtgttggaactgtcacctcataatgagctggaggttgagctgcaacctccttaggtggctctggaagctgagctgggaccatctgctggcttgaagattctacctccttagggggctctggagcctgaactgtggcctcctgctgggtcggagaaggttctgcctccatagagggctctggaatctgagctggaacctcttgctgagttagagatggttccacctactgagggaactctggaggcaaagatggggccatctgctgggtcagagagggttctatcaccctagggggctctgaagactgagcagggactgcctgctggactggagaggattctacctctttaggtggctctaaaagctgagttggggcctgctgtaggactggagatggtttgaccttctcaggtggctctgatggctgagctggtatctcccctgtggtggaggactgacctcttcagtggacttcagaggatgacttgaggcttcctgctgggttgcagatggttcagcctccttagggggctctggtggctcagctgggaactcttgctggactggagaaggttctgcctccctagggggatctggagtctgagctgtggcctcttgctggactggagattcagtcttttccggagaacacagaggtggggaagggagatcaggctgggctagagaaaagtcagcctgctcagtgggaataggagggttgtcctgctgggctggagaagattcaacctccccagaagactcagaaggctgagctggctgcttctgctcactgggggaaagttcaggctctataggaggacctggaggctcagttggagcctcatcttggattgcagaaggttccatctcttctagaggctgagctgggctctcctgctgggtctgagaagattcaacctccctagaagactcagaaggctgagctggctgcttctgctcactgggggaaagttaagcctccataggaggaatgggaggcacagttggggcctcctgttgggttgcagaaggttccacctcctctggaggctgaattggggtctcctgctaggcttgggaagattctgtctcattggtaggctctgaagttatggtaacatccacatctgcaggtttaaattgtaatgttgggcaagttataatgagcttgatcctcacccggaggttgaactgtcacctcatgatttggtggagtttgagctagactctccatagaggactctggaggcagccctagaggctcatcagagttcaccggagttctggaggcaggctgctgggatacagtatatccacacttgaatattcatccagcaaagtttgtttctgacaccgaggtttggataattgctcagcaaggctccagtgctgagctagatctctcttcagcttcttgggcgaaacaataaatttggttggtttttgaaaccttactgtctagtggaacaagtatttcatctgcctgatgatctgcagcctgatctaggtctgcagtttgaaccttacttttgaggtgaggaagctgaactagggtctagttctgatcccagtccagcattggaaccacctctggtgccttttcttcggagtcagcttgtcatttagatcctggtgtgcagccgagaactgctctggaccccggggggcagctctccagctgaatccgtgtccaggaacagaaccaaattttcagtcgattcctggggcggggctgacatctgggaggaagcagacgacgcgacgccacgtaatcaaagccctccaggtcagcagagggagtagacgcatggggagattcccatgggagatgggaggagcaggaagactagggctcagtaggccccgggggttagaggtcagctggagcgggtctttgacccactccagaggctgagcctcctggactagtagccacaatagttgccacgtgaggaagggccttgggccccagagacacagctgggacatgacacacgctggcgctgtgcagtgagtgggagccattctaacagcctggagaggctcgcacccgcgataagcgtgcgccccgcccagtctttatgacatctttatgccacctttattaggcttgggtccagatctgctccatgtctccatggcaatcttatgtcacaatcccgcccaagctcccctttcccccctcccctctcctccccttagcgaggtaggatttgggccgcagacccgggtggtcccaggactcctggggcctgttgtggtggggtggggtgggggcacggcagagcttcccaaggaagtcacgggaccccgcctcaggatattcagaagctctagtccagttctggcagcctgaactcttcctcctccaaggtgaaatccaagaatacacttccttccaaggacagcaactgacctgcaaaatgggcgccagttagggtggcagggaggacgcacattacagtcatttattccaaaatttgccattttcgccaaactttcggtatcttttgttgcatgtttgataattcaccaccctattaggtaggggctgtcagggagtaagcccggattccaaattttctgtaggaggggcattgggggtaggcaattcagtctgggagagtgaagaatcctttgcactagcctgggaggaggctgaactgtcatcctgccttgacttaacacagccattaccctagaagttacagcaccacccttcagagatctaccctgggtgtacacatggagaagaggcttaggttgttaaagtcagcatgtcaaataatttcctgaaatgcgactgtaactagaacccagctgacttcccccacagccattcttacctattgtattactgtctggcacaattaccagcatgtaaactccaagaaggtgcttcatcttcttccagtgcctggcataggcatagcgtgcacagtgatggttttaaaattgaaggggggccaggtgcagtggctcacacccataatcccagaactttgggaggctgaggtaggcggatcaccgaggtcagaagttcaagaacagcctgaccaacatggtgaaactctgtctctactaaaaatacaaaattagccgggtgtggtagcgcatgcctataatcccagctgctcgggaggctgaggcaggaggatcacttgaacctgggaggtggaggttgcagtgagccgagatcgcgacattgcactccagcctgggcaacaagagtgaaactctgcctcaataaaataaaataaaataaaataaaattgaagggattccaagattcgcctcatttagggatagatctattgttataatcagatttctgaaatcagtgctgacttcctctcacatttcacgggaagctagacttcttaaagcttgaagttttcttggtgggttttatttaaattgaattaaaataattattttacagggaaaaacttcaaaacactttgcaactttggtgtaaaagttaaataaaacactctagccccaaatgaagttctcactgaaatgaaacttttgcccctttttttttttaaattccatatatagtaaataatgactgttttgagatttagaaacttaatccctatttaagagctttcatatacagtcatgagttgcttgccatcatagcgtatacttacacaaacttaggtggtatagcctacagcacacctaagctatttttagtagagacagggtttcaccacgttggccaggctagtcttgaactcctgacctcgtgatccacccgtcttggcctcccaaagtgctgggattacaggcgtgagccatggcatctggcctgtttgtttgttttttgagatggagtttcgctcttgttggccaggattcagtgcaatggcatgatgttggctcacagcaaccttcgcctcccagttcaagtgattctcttgcctcagcctcccgagtagcggggattacaggcatgcgccaccatttctccatgttggtcaggctggtcttgaactcctgacctcaggtgatccgccggcctcggcctcccaaagcactggcattacaggtgtgagccaccacgcctggctctgttacccttgagtttttatctccacatacttgaattaagccgtgtagttcttcttcccatctgacatctacaatctcttcactgggtctgtactccacagctattttaccactttctgaaataaagttagcaaggagcaattcagaatctttttcattctaaaacttcctgcatataatggtagcaccccacagtgagacattcttttggtttctaaaagcagaaaataagagcattttcctggaagtttcctcatctcatcacatacttccctgtccctttccctttcccccttccttcccctcccttcccctcccctcccctccctccctttcttctttttcagggtctcactctgtcacccaggctggagtacagtggcactgtcatagctcactgcagcctggaattcctgggctcaagtgatcttcctgcctcagcctccagagtagcagggactacaccactgtgcccggctaattctcttttttagagacatggtcctgctttgttatttcaggctgtctcgaactcctgacttgaagtgtccttctgtcttggcctcccaaagtgctgagatttgaggtgtgagtcaccatgtccggtctcacacctcagtttttaacatatgtatgaaatatcaactgtgtttggttcaaaggactttatgatcttacagataggaactaaggaataataacataagaaataaaaaatttggaaacaaaaatgttcaatcacaatattaaatagtaaggcatcaggtgggggggtcgaagttcaaatccaaaatggagaccactgggctagtagacacttcacattagaagcacggctaggtgtctactccctgagaaccaaaattccaccagatacaatgagcaaagcttcagagagagagaacacttgaacattttattggcagaaaatatcccgcatactctatagacaatacaacttccttcaaggcaaattagagatataaggcttttggtctaagaagttttgagtgtgtgcaagggatacctttgtatactagggagaggtaaacaacccacacatttagcttggttattaaaggttgttactcagacttgacagttgatgaccaaggaagtaagactttcactagaagggcggcccaggttggaaagccgagagcaatcagggccacctcttacaagcaaataaggtctgtggtaacttaattaggatctctgtctctaagtcttcagggctgtgaagcagaagagcaactctgttcagggactctttgctaaacatcgggcttcctctgggcacagcctataacatttgcaccactgtagaactgaacagggaatacaagcaatggcattcaatagcatgaccacttccaaggctcacagcaaagcaactgattattgcataagaatcctatttggccaatatgtcagtgccagaaatgaaagctggaactgaattctcgattcgggaaacataatctagtaaactcttcggcagagagtttattcagagagaaaacaacaataatagcatattttgtcgcttaccttgtaagtatagttctgagtttttacatttgtcatctcattttctcaaacaatatcccccataaggttgattggattactaaccccagtttgcagataaagagattgcagcttagagatattaaatatcttcaaatctctctggctataagacttaaaattgaataaaaaaaaatctaagagacagagttaggactcaagtccatgtgtccaaagcttataatcactattctgtatgataggcatgcaattaaagaagacctgcctcaaacattttccgtgtgaactgaggcaagtccttttacaactataaactagggacaatagttgctgccattttttctacaaatgtcacaaataacaaatttgagcctgttgctgtgaaagaatttagcaaatgaaagcatactatggagtgttttagatatcgatatttttatccaattaacttttcaaaatgagtttatttgctcattgaaactgaagttaaaattaagaaagttttacctagaaccacaatcaacagtttctggaatgcatctgacaaaaccttctgaatagcaagcttctgggctgtcttccctttcataaggaacaataacggtcttaaatccaaccaaaacaaatggatttaagatacctatctgagtgataattgctacacgtttaaaaaataaaaatgcatccatgattcttagctcataatcttcatgattaagggtagacagcacaagggtatggttgaatggctctgttataggtacatcctggcagggcccatttttactgcctccatctagttgggaagttccggaagtactagaagggagatacaagccaagaacctggcacatgctcacatcacccagagatttcaaattcatcagttaaggctacactcctacagaccctaccctcctatgcatcaagggctgaaatcactcaccgaaaaaggtttggttggctggacatggtggcccatgcctgtaatcccagcactttggaaggccaaggtgggtggaggccgggagttcaagaacagccaggccaacatggtaaaacctcatctttactaaaaatacaaaaattagagaagtgtggtggcatgtgtctgtaatcccagctacttgggagtctgaggcacaagaatagcttgaactgggaggtggaggttccagtgagccgagatcataccactgcactctagcctgggcgacagagtgagactattcttaaaaaaaaaaaaaaaaaaaaaagagaccaggcgcagtggctcacacctgtaatcccagtactttgggagaccaagatgggcagatcatttagatcacctgaggtcaggagtttgagaccagcctcggcaacatggtgaaaccctgtctctattaaaaatacaaaaaaaaaaaaaaaaaattagctgggtgtggtggtgggcaggaggcagcagaattgcttgaacctgggaggtggaggttgcagtgagccgagatcacaccagtgcactccagcctgggtgacagagcgagactccatctcaaaaaaaaaaaggactgaatgttaacacaaaagtttttgtaaatctttagatgatgacctggcatggtgggtggctcatgcctataaccccagcatcttgagatcctgaggcaagaggatcacttgaggccaggagcttgagaccaggcaggacaacacagcgagatcccccatctctagaaaaaataattagccacatgtggtggtgcatgcctatagtcctggctactcaggaggctgaggtaagagaatcccttgagcccaggagttcgaggttacagtgagctatgatcatgctactgcactctagcctgggcaacagagtgagaccctgtctctaaaaaaataataataataaaaagataaataaataaatctagatgatttgctgggataactgaaggctacaagagatacgtatgtgaaggactattttagtacaaaacaagttcttaacccaaaactggaaaaacattacttcgttcttcctcctaagcttcctggcaggaaattgactttacaattttaaatttaaaggttttgtcaggtattgcctaaggtgaaaacctatattgtaagacacaaaaactctgcctaggacttcagtagctcagagagggaaggacttaatatgtgtctgaaaagatgagttttagaaattaagaaaaaagagatcattcccacttcaactccttactctactctacccccattgaaaacagaccttcctccgccttacccacaggttcctccaccaagccaatgccagactcctgcaatcataggatggcagcaccacctctaaagcacagaacttcaggctttgcttcggaagtggcaccatgtctcttcattttccctttcttcaagggaaaatccttgaagaaatttccttcagaaaactcctgaagctgttagaatttttagtgtgagttccttccaaggatattaattaggcttcaaactgttttgttctgagaaataaaaactaaactccagtcattcaagctaagagttgaggcattctatggcttcaaaatcaagtaagatttgcaaaggaattgctagatacaaccgttttttattatatgccacacaaacagtggagaaaattatggataccaccatccaagtgattgagattattaatttaggtagcaggccaattcagacatgtccacttatcaatggcaggaggcctctcacatctcctccctataacccatttcaatacttctgtctacggtctagaatttcaatgttgaaaggagagtgtggttattgaaagaaatctacaaagtttaccctgatgatcctttttgacatctactgaaatcaaagtagtaattcggcagttcttggcatcaggagctgtttagggcaagagcttgttgtggaactgccttatgtctggtgccaagacgaacctaaagtcacaagagatagacccataaatatcacaacctgccagagatttgaaagaaaaagaaaaggacacttaaactagatggcagtggtggtcaggtggtaacccaaggctctgagttcagtaagtaaatctaatatgaatgccctctcctttcacctatctattgacttgtagaacatttccttcattactgcatcagcgatgagctttattctgtgaaattctcaaaacctaaagcttatgaagtggtctcaatgtccaaagcgcactacaaactcattacgtacaaaatgatgccaactaactgtttcatcatctttaccgtacctttacaatatttgagtggctatgtgaaatggtcacaggttagaaacagatcatagtccaaaagttaaataatatattacaggtaatcatttcagtcacaggaagtgggaccaggattgaagagggtgttgaacaagctacagaagtgggtatagaatacccggagtcattactaagcagagttctcagattcgatcaaggttaattcgatgaggaatggaatatagacaagaataggcagcaagattagcaggaagcagtcagatcaagtagccaatcaggcattgaaatggtccttgaaaaaggaaaggtgattgagtcgaggcatacaatgaaatatcattctgtggttctgggaaagtaaaattggttggcatgttagcatggaatagggtttctacaaggccgcttaaagaatgttcccactctgagaactgaggggagttccaaataagcagtttgtgagtgatgatgaacatgatgatgatgataaagtctccttatgtaagagctggcagaagagttggtcacacctacatgttttaaattcacataaaagtaaatatatggccgggtgtggtggctcacacctgtagtctcagcactttggaggggctgaggcaggcggatcacttgaggtcaggagttggagaccagcctggccaacatggtgaaactccatctctactaaaatacaaaaattagccaggcgtggtggtgtgtgcctataatccaagctactcaggaggctgaggcagaagaattgctggaacccgggaggcggaggttgcagtgagccaagattgcgccactgcactccagcctgggcgagagagactccatctcaaaaaaaaaaaggtaaatatagctaggcatggtggcttgtacctagctacttaagaggctgaggcaggaggattgcttgaggtcaggacttagagaccagcctgggcaacacagtgatactgtgtctctaaaatattttaaaaagtaaatataagcagaactcttctggtgaaaatttcattcattcattcattttttagagatagggtttcactctgttgcccaggctggagtgcagtgatgcaatcatagctcactgcagcctcaaactcctgggcccaagcaatcctcccatctcaacctcccaaatagctgggactacaggtgcatgccactacaactggctgatttaaattctttttctctctctcactctctctctgtgtctctgtctccgtctgtctgtctgtctttttctttcgtctgactccgttgtccaggctggagtgcagtggcacaatctcacctcactgaaacctccacctcctgagctcaagcaattctcctgcctcagcttcccgagtagctgggattgcaggcaccgtccaccacacctggctaatttttgtacttttagtagagatgggatttcaccatgttggccagactggtctcaaactcctgatctcacccaccttggcctcccaaagtgctgggattacaggcatgagccactgtacctggcctgaaaaaaataatacttttgataaatctgaaaatctggggctatttctgtcactgagagaaggtgtgtctttccccttaaactaggttcatgttgctgaggaggcagagggctgagttcttccatccatcgccttcaagtgtcaggcggcttccggttggacaagatggctaccccagtgggcttgtttcctctctggtctctttttctgtctaagactcactccataccagcctgagcttgggaccattgttttgctcctctcatcctcctacccccagagctgacagatttagcaaataaaatttacaagatcctgttaaattagaatttcggacaaacaacaaactaccccacactgtctcaggagggtccctcagagataagtgtcactgagcctcgggaaggaggaagctccatccctgcccatcaagccccctcttggggtcccctcaaggaagacagtggttccagaaggtgtgttcccaccccctttcacagcctacctctctcccatccctctctgaccccaggttccagctggcctggggatttctgggaggatccgaagaacaaggccatctgcagtaggagcctcctgttcctcgccacctacgcttcagccctgcccaactaacagctctccatgttctaaagaaggcaggagtgctggaccaccccagccttctggaaccccagttctgtgacattatccatctcctggaaatatgctggttttaaccatgcaaattagttaagcatcaggcagaaatagcagctgggcctggaagcacaggtgacgtctgtgaggaaaatggctgggtgggacagggtggagagcacgggctgttcccttcctttctgggaacagcaccacctttggggtaactccttctctcatggggttttaggcgggggctgccagtgccagtgcccggtcccctgtcaccccccatagtcataggaacgcttctgcgccagtcactacatttataaggggaagctggtggagctgctcagcttccaacaggaagcccatgtgtgcagggccagaggacacagcccatctgaggtgctaagcttctgtgaagagggagtggagtctggaccggattccagtcccacggtccaccctttctgggacccaaacacacccttccccttccttcaattctgagaagcagtaaatgtccctacttgcgaacaagtttgagttgggtttctgtcacttgcagccaaaagaaacctgccagctactgtcagcatcggtcaaccatctgtgaaactgtgagctgacaacctgtcccctccctgtgaaggccacaacatcccaacaccattagtcaccaaggaagtctgggagaaatttctaccagaaaggggcaagggaggaaacattttgttactgctggcccactctaccctctgaaacagggcggcaggatctggcagaaagaaagtttacaaggggcttctaagcaggcagtgctgccccatgccccccgggcttctcctcccagcagggcagcagcatatggcaccctgggataggaggtctgcaggggcgggggcggggaggctgaacatcctgggggcaccactttatgaggaaccatttatggccagaactctacaggggcttcagggacctgaatgaactcatctctgtagagtgagagtcctgggcaggaggagaggtttccatagcccaggaccacatgctggaaatttggtctctgcagcttaaaatctgagagaagatggtgtctgcagcattcaaagggggaccagagggaccctccacccctggcccccccagctattacaaacatgagccctgggaagattcctatcaaaaacccaagctggggcccatgagtcaagtctggacgtgcagtttggggcaagaggacagatggacgccacaggccatctgtctaaatatttccaaattataaattaaactaacagggtgttaaataaagtatgttctaacctcatcccctgacaaatattcctttaaaatgataaaatttaaaaatgtgtatgaagctatgatttgtacatgacagaaagttagcaaaatatcaaagatcataaaatttttttgcttttttttttttttttttttggagacggagtctcactctgttgcccaggctggagtgcagtgacgcgatctcggttcactacagcccctgcctcccgggttcaagcaattcttaatattgagatgcgtaataaaataaagatatgtgtaatttataaattactgaaactattccatgaaatttatttttattcctttcagcaaaatcaattattattgtcaagatttaaaaatacatgtaagaaggctgggcgcggtggctcatgcctataatcccagtattttgggaggccacggcaggcggatcacgaggtcaggtgatccagaccatcctggctaacaaggtgaaaccccgtctctactaaaaatacaaaaattagctgggcgtggtggcgggtgcctgtagtcccaactactccggaggctgaggcaggagaatgacgtgaacctgagaggcggagcttgcagtgagccaagatggcgccactgcactccagcctgggcaacagagtgagactccatctcaaaaaaaaaaaaaaaaaatacatgtaaggattaaaacagtcatattcacagtacaagtatcttaacattttcatcaaaataagtttatgtaaaaaatttaattttgtcagaaatgttttcccaaacaatattcttttcaaatattgaaaagtatctattgctgggcccagtagctcacgcctataatcccagcactttgggaggctgaggcaggcagatcatgaggtcaggagtttgagaccagcctggccaatatggtgaaacccccatctctactaaaaatacaaaaaatattagccaggtgtggtggcgcacctgtagtcccagctacttgggaggctgaggcagaagaattgcttgaacccgggaggcagaggcttcagtgagccgaggtcgtgccactgcactccagcctgagcgacagagcgagactccatctcaaaaaaaaaaagaaagaaaagtacctattaaaccaaaaggcaacatacaaattagaattaatcaaatttgtaaatcaaaatgattgaaatccattttattttgatttttgaaaacttaattaaattacattaaattaaaattcataattctagcattcaatgaccacctcattgccaatgtaaagaaaaggtggccgggtgcagtggcttgcgcctgtaatcccagcactttgggaggccaaggcgggcagatcacgaggtcaggagatcgagcccatcctggctaacatggtgaaaccccgtctctactaaaaatacaaacaaaacaaaacaaaaagccaggcatggtggtgggcgcctgtagtaccagctacttgggaggctgaggcaggagaatcacttgaacccggcaggtggagcttgcagtgagctgagatcgcgccactgcactctagcctgggcgacagagcaagactccatctcaaaaaaaaaaaaaaaaaaaattagtaagcatcacagtttgtctgagggctagacacagatacaaatttaagaataatgtgtaatgtgatttacttcatccttttctcgtttgcccagagaagactcaccggtggcacctgcagctgcagcatcttcccgaagataactttgccatgaaatatctcactttattattattttcgcatcactctagtatatccactttggaaacaaaaggcatcattctatttatagcattgtgtttttagtagcgggatttccatttacaaaatacagtaattgtccatggctgaaaatatcaaatcctagaaaacatagcattcctacacatgatactaacatcattctccaacagttgttggccaaagattcatttgatgaatctgatttttccagaatagactattctgatgattcagatgattctgatgttagttctgtttataaataattccaagaacagtttttatattttattttcaaactgaaaatcattcagatttgtggccaggcatggtggctcatgcctgcaatcccagcactttgggaggcagaggcagatggatcacctgaggtcaggagttccagaccagcctggccaacatggtgaaaccccgactctactaaaaaatagaaaaattagccagctgtggtggcaggcacctgtaatcccagctactcgggaggctgaggcaggagaatttcttgaacctaggaggcagtggttgtggtgagctgagatcacaccactgcactccagcctgggtgacagagcaagactctgtcgaaagaaagaaagagagagagggagtgagggaggaaggaaggaaggaagaagtcagatttgcttcagcatcaaagagcatgtttctgtaaaaggaaggaaaggaagggaaggggagggaggagggaggcggggaaggaaggaaatccgtgatatttgcttcagcctcaaagagcatgtttctgtaaaattaaatgagcactggcagtgagctgccccttttttcctaaacgggaaaagggttaatattgcaaacttttcctcagcttctatgcaactgagacaaatactgtgctaactcatgaggacctctggaaccatgatatgttaacttgtctttctcttatctaagtccttttctgcccacagcttctctgtacatcaaaatagtgcctaccagaggccccattcaacctttagatttagttataatttttcccatggacagaggataagatgtagagaagcatccctctggggcctgaaaattgtcagtcaagagaggatgcatggggttaggtggtgctgcaccaacgccaggcaccagatccagactagcagaggcatcctgtgggccttaatgttttttgtttttttgtttttttgtttttgtttgtttttgagacagccttgctctgtcacccaggctggagcgcagtggtgcaatctcagctcactgcaacctctgcctcccaggttcaaatgattctcatgcctcagcctctctagtagccgggattacaggcatgtgccaccgcgcccggctaattttcgtatttttactagagacggggttttgtcatgttgtccaggatggtctcgaactcctggcctcaggtgaactgcccaccttgagctcccaaagtgctgggattacagacatgagccaccacacccagccttgtagtccttaattaatttagtttttttgtatgtagagttctctaaattgcagggcccagtcaggggctcctcttgtcagctctaaggacaggactgggaaaatatacttctggaaataaattgctgtagaaaacagaggattttttttccccccgagatggagtcttgctctgttgcccagagctggagtgcaatggcgcaatcttggctcactgcaacctcccccttccgggttcaagcaattctcctgcctcagcctcccgagtagctgggattacaggtgcctgccatcacacctggctaatttttgtatttttagtagagacggggtttcaccatgttggccaggctggtctcaaactcctgaccttgtgatctgcccacctagacctctcaaagtgttgtgattacaggcgtgagccacagcgcccaccctacagagaggaaattttaaggaaatgtctgctttgaatactcaataaaatataagacaaaaccaaaaatgatacagtgtgctgaaattctgacagcaatgataaaagaattttcaaggaactgaaatccagtgacaaaaatgaaatcgatcaaggctgtagttgcacacctgagacattcctcgagaaggcagaggagaaaggtgtgaaaaacagtgaaccagagaaggatggccagggacaacaaagattggagctcggaagttgaatgacagatattctggagaaacacaccagagatgacaaaaggtgggtctgtggagctgacaggtgtactttgttccaaaaaaaaaaaaaaaaaaagaccgtcactgcttagacatatttcaaatcatatgattaataagactgaatttttggctttattatcaggcttgtctttactccacagaaggtataccttctcagatatttcaggaataagtacacaaattgatataaactgggttacaaaaaatacctcaagctttccaaggagaaattatatagataaatattctgactacaattaaaatcccacagagaccagcctggccaacatggtgaaaccctgtcttaactgcttttgttccaataaaacaaaatagagagcaggatcctcaggcttcgatgctatttgcttaatccaggtggtctgtggagatgcctgggacagaaagcagcagccggactccagaatcccccatgttaatagctattctatgctatgtccccgtcttattgctggcaactcacctctcagctcaagcattgtgacattacagcaagaagtattaatataaatgacacaaaagaaaaaagaaaccatggggttttgttttattaagtaggtaggcattgtacatgtgcagggtgggaaatgatcaggagacaggtatccaatgagcatctgccatgtatcaggcactgcgcaatgttccttacataccacgatcccatttaatcttcaaaaaacactgcagagggctaccactgccttccttttacacacgaaaaaactgagacttaacagttgctcatgggaagttgaaccaagagtcaaaacaaaagactttcaggccccaaaggctgcactgtttccactgcacaaagttgtctgcactgtgagcaacagaggagaggaaaggggactaaaaacaaaaaccaaaaatcccataaataaaataaatgaactgagccttcaacccaaaaagttataaggagcagaaggaaaacatttccaaggaaatcaggaagaagcaagcttaagaataaaagcatgacatgtgtatttaattggatccaggggaaactattggggtgagatgttaaaaacggagttaggaaatgactggagaacttgtgtattacactccacttcctatggaccttgggtccttctctgtaacactaatgtttgactaaattcttcaaagtttccttgcaaggagacggccactctgaagccaaggagttaccaccaacagactcctttaataacaacacaataggtaaattacccctgaaggcaaatataactgattatcttatagtagcaggttttaaaaccttgtctcaaaagcattgctatgggccaggcacagtggctgacacctataatctcagcactttgggaggctgaagtgagaggattgcttgagcacaggagttcaagaccagcctgggcaatatagtgagatactgtctctacaaaaaataaagtgaggtaaattagtggggcatagtgctgtatgtctatagttccagctatctggaaggctgaggtgggaggatctcttgagcacagaaggtcaaggctgcagtgagctatgattgtgtgtctggaattggtgggttcttggtctcactgacttcaagaatgaagccacagacctttgtggtgagtgttatagttcttaaggtggcacatctggagtttgttccttctgatgttcagatgtgtttggagtttcttctttctggtgggttcgcggtcttgctagctcaagagcgaagctgcagttcttcacagtgagtgttacagccataaaagcagtgtggacctaaagagtgagcagtagcaagatctattgcaaacaacaaaacaacaaagcctccacagtgttgaacaagacgcgatgcaggttgccactgctggttcaggcagcctgcttttattctcttatctggccccacccacgtcctgctgattggtagagctgagtggtctgttttgacaggacactgattggtgtgtttacaatccttgagctagatataaaggttctccacgttcttatcagattagttagatacagttttgacacacagggtctccaaggcctcaccagagcagctagatacagagtgtcgattggtgcactcacaaaccttgagctagacacagggtgctgattggtgtgtttacaaaccttgcgctagatacagagtgctgattggtgtatttacaatccttgagctagacataaaggttctccaaggccccaccagagcagctagatacagagtgtcgattggtgcactcataaaccctgagctagacacaggatgctgattggtgtgtttacagtctctgagctagacataaagactctccacgtccttaccagacttagaagcctagctggcttcacctagtggatcctgcaccggggttgcaggtggagctgcctgccagtcctgcgccatgcgctcgcattgctcagccctcgggcggtagatgggactgggcgccgtggagcagggggcggcgctcctcggggaggctccagctgcacaggaacttacggaggcgggggaaggctcaggcatggcgggctgcagtcctgaggcttgccttgagggaaggcagctaaggcccggcgagaaattgagcgcagcgccggtgggctggcactgctggggaacctagtacgccttccgcagccgctggcccgggtgctaagtccttcattgcccagtgccggcagggccggccggctgctctgagtgcggggctgccaagcctacgcctacccggaactccagctggcccgcaagcgcggcacgcagccccggttcccgctcgcgcctctctctccacacctctttgcaagctgagagagtgggctccggccttggccagcccagaaaggggctcctacggtgcagcggtaggctgaagggctcctcaagtgccgccaaagtaggatcccaggcagaggaggcgccgagagcgagcgagggctgtgaggactgccagcatgctgttacctctcaattgcaccactgcactccccaccctgggtgacagaacgagatcctgtctcaagaaagcattgctaaacactttcttccataaaattatattttgccctgagggaggcccccagccagactgtgaagtgccacctcctgctgctggcccctgagggtagcgggcaaggaaggagcatgtctctgctgtgggaagtgccagggaaaagcccctggattgggtcaccatgaaacgcaaagtgggtgaaatacaaacatacctttgaaagacaaatacggaccttagtgaatgagtctgggtcatggctggaccggagaaatcccagggtgagccagcccaaacacaccatccatggaataaaaaaaggaactgctactccaatggtcagccctgtgagaaacgcatccttccatccagctaaaatctgcctgtgtccatcttgtctgctcaacaccagtccccatgctttgggacacagagcactgtaccctcctgcatggaatggccagccactgggcttcagagccaaacaaacctgggctcaaaggccagccctgactctctgttgtgtgatgtccggcataatggtgctagtagttgatgtgcccatctgccccacctctgcctggctgtacttgtagctagtacatgtatactatatatgtgcccgactgtttcattgtatgttccaggatggtcatgcctgagttttttttttttttttttttggtggggggaatctcactctattgcccaggctggagtgcggtagcacgatcacggctcactgaagcctcaaatccctagccttaagtgatctacctatctcagcctcctgagtagctgggactaccgacctgcaccaccaagcctggctaattttttaaaatttttgtagaggttgaggagggaggggctctgttgcccaggctagtctcgaactcctggactcaagtgatccacctgcctcggcactgggattacaagtgtgagccatcacacccagcttccctgagcctttatacagaactcgcctttgagttaggttctgttgtatattctagttagggcattatattgattttttaaattactatcattctgaattaataacaaattgtggtacattcatacagtggaatagaactcagcaataaaaagtaatgaggggaggtggggatggttaatgggtaccaaaaaaaaaaaaaaaacctgattgagtaagtcctagtatttgagagcacaatagggtggctataatcaataataatttaattatatatttaaaaataactaatggctgggcatgctggcttacgcctgtaatgccagcactttgggagacagaggcaggtggatcacctgatgtcaggaattcgagactagtctgaccaacatggtgaaaccctgtctctactaaaaatacaaaattagctgggcctagtggcacgtgcctgtaatctcagctatttgggaggccgaggcagaagaaatgcttgaacccaggaggcagaggttgcagtgagccaagatagcaccactgcactccagcctgggcaacaagagtgaaactccatctcaaaaataaataaataaatgaaaataaaaataagagtatataattggattgtttgtaacacaaaggataaatgcttgagggtctggaaaccccattttccatgatgtgattattatgcactgcattcctgtatcaaaacatctcaggtatcccagaaatacatacgcttacaatgtacccacaaaaactataattaaaaatttaaaaagtaatgaactgttggcacacaaaacaacatggataaatctcaaaataattatggtgagtgaaagaagcctgacaaaaaaaagtacacactgtatgattccatgtctagaaagcactagaaaatataaactaacctatgatgacagaaagcagatcagggtcaggcatggtggctcacacctgtaatcccagtgctttgggaggcggatcacatgaggtcaggaattcgagaccagcctggccaaagtggtgaaacccagtctctactaaaaatacaaaaattagccaggcatggtgtcgggcacctgtagtcccagctatttgggaggctgaggcaggagaattgtttgaacctgggaggcagagtttgcagtgagccaagatcgcgccactgcactccggcctgggtgacagagcgagactccgtctcaaaaaaaaaaggaaaaaagaaaaagaaagcagatcagtagttgtttgggggtgatggggaagtagaaagggcagaaagcaggatcaccgggggtaatgaggaaactttttgagaggatggatatcttcactatcttgaatgtgatgatttgagctgtataccaagggtcagataccaaattgtaatctcggtatatgcacagtttattatatgtcagtacctcagtaaatctgcctaaaatgtttaaaaattactgtaattatacaaaatacattttatgaaaaggaagtcatgaatggagcatggttgagaaccccagcatcaggtagattcagaaggaagtcatgagtggagcatggttgagaaccccagcatcaggtagattcagaagtggggaaaagcatctcccacttccccttcttcaggccagcgtgctgtgcaatttatccagtggccactagaggacagcagcgactcatgtacaggaagtcggcgtttcagggtttcaatactaagaattccctgctctgtgctccctatcctgggaggtgggcgttaatacccccataatactcagttagagctgagacttgggactcggtttctggctcctgattccatcttgttggtcccccaacaccaggagcacagggaggtcgcccagactatagcgcagttggcactatctcagctcactgcaacctctgcctcccaggttcgagcagttctcctgtctcagcctcctgagtagctgggattacaggcgagtgccaacacgcccggctaatttttccatttttagtagcgatggggtttcaccatgttggccaggctagtttcaaactcctgacctcaagtgatctgcctgcctcagcctcccaaagtgctgggattacaggcatgagccaccgtgcctggctgacaacactcttactaaattaactgcagagaggtttaagaaacgcctaaagaatctggtgtggtggcttacgcctgtaatcccaacactttgggaggccaaggtgggcggatcacttgagcccaggagttcaagaccagcctgggcaacatggcaagaccccttctctacaaaaaaaattacaaaaattagccgggcatggtggtgcgtgcctgtagtcccagctactcaggagcttgagggaggaggatcccttgagcctgggagttcaaggctgccgtgagctatgatggcaccacagcctgggtgtgagagtgacacccagtctcaaaaaaaataattgtggacacacattgaaccctcccagtgggtgaggcatgatgccaaacactgtatgaagggaatcatctcatcttcacagcattgttactaaataagctgcagaaaggttaagaaacacccaaagtcatagagctggtaggaggcagtgcaaggatttgcatccagatttgacactaacacgtgggcctcgctactgctctgtagtacccacttaaacggaagtgtccttctcgattatttagttcatgtgttacactcgttggtgttggtagcagatggttggtattgtagttcagctttctggagaaagcttgtcaggcttcaagagaatgtttagcatctgtgatggtccatgagggaggttcccctctccaccccttcaccactttacatggagcatttacagtgtgtgagtttccatgctaaggatgatactttcatgatgacagtgtctgaagggcaggtgggcagaggccagcaacatggaactgaggggtcagtgatgcaggaatccagtgacattgtttatttgcactcacttaaaagggtttgtcaaacacagcccaactcaactggagtcctgagaaggtgaccagaccaggatggaggcccagggaactcaccagaagtccccatgcatcagaacaaggtcgaagcatcctggtgagtagataacacgtgcccatgctttgtgggaggaagtcctccagcagtttctctccttccccttggctttgactcagcctacctgggattatgcagttggttctccactccagatgcctcagggaggtgacccttcctgttctgggttctgcagaaaccaacagctctgggcttgtgcccatcaagcactcttctgcccattttatactcttgtggacgcatggtggtgttgatacaagccccgaattaaaggatccatggctgcccgtgacaagacaaagcaaaagcaggccagagttaaacaggccccttgggtcccttccttcatttcataaatgggaaaatcaaggtctgggcagggaaagggactcagccaaggccacatacacagcacactgatggccgagccggggttaggactcccagcataccctgtagacttctctaataatagataggctgcttggtttttctttattaagggttggttacacattatctctctctgtctttcttaaaacaattattctttaatatctttatatattcagtaagtgttcaaatttccaactattttatgtcaaaaagcattttctaacatttttattaaatcaagatccaaacaagatgcacacaatatgattagttgatgtctcttaaatctcttttaatccatggattcctctttaatctttctctttttccctttattcttttttatttgcttatttttttcagacggagtctcgctcttgttgcccaggctggagcgcaatggcgcgacctcggctcactgcaacctccgcctcctgggttcaagtgattcttctgcctcagcctccccagtagctgggattctaggtgttcgccaccaagcccagatatatttttttgtatttttagtagagttggggttttgccatgtaggccagtctgctctcgaactcctgacctcaagtgatctgcctgccttggcctcctaaagtcctgggattacaggtgtgagccactgcgcctggcacagaaatggtaatattctatcatcctgtcttcatttattagctggattacttctaaagagaaactcctccttgttaactattccattacctggagtcttatctcatcaattctgggaagattctgggtacgtgggattatccccacttccatgttaggccagaggtcagaggggctgaaggaactgtcaccagcagaagaattggctggcccagccaaccgacaaaatcataataaataattaaaaagtgaaggctgggtgtggtggctcatacctgtcatcccagcgctttgggaggcctgagcgggaggcttgcttgaggccaggagtttgaggctgcagtgacctatggtcacaccactgcactccagcctgggcaacagagtgagaccctgtctctaaagaaattaataatcaagtggttgttttaaggccctaaatccatcagcagcccatgcatggcaaaaccaggcctaggggcccctgggccctttccttccttcacaggaggtcagacctgcacagagtcatcaagagcatgcagttcagcctcgccatgtgcagatggggtggctgaggactgggaggtatagtgactcatccaggcctgcgcacatcacccaggtcatgggcatatccttaaaagaaactcctgaaaattccttgtgatgggtttcagtgtctttgctggctgggcctgatgttctcactctaaagcctgtgcctgtaagcacttgcactaggcccaccattcgacctgatcttatttcctgtggtgttctcaatgctgataacaaatgcttggtaaatatctgttgaaatgaatcaatgaatgaaggaggtgttgtttctgtatgtcaggaatgggctgctcctggacctctccactggggaagatactggaggcattgggatgtccacagagcagccatcctggtgggcccagcgaaggagccaagggcacagggatgagtgggaagcagagagtgggaggcaggcaagagagctcactccaggaaagcaagcagagtgggagacctgccctccaccctggcaagggtccagccgaggaacagaatcctgctgggtggggaggcagcatagatggggttccagcaggtagcagggaccagccactgagctggggtgagggcagaactccagttgcaggatggagcaggccgggcccccatccttacactgggcaagtgaccaaggtgagaactcaggcccaaggagcaagtcagaagccctgtgtatcaggtaggattcagttgggttgagaagaatgaaaaccctcaaatatcattgtctcaaacaagttcaaagctcagtttctctctcatgtttagctgtcctgagggaatcaatccagagccaacagagtgctccatgatgcaaaggctcctgtcttattgctctgccatccacaaacatgacttctaccccatgatacaatatggctgctggagctcagcctttccatgctatattccaggtatcaggaaggagtatgggaaggagaagagtactctccttttttttttttaacagcaattcccagaactgcacagatggttttctttacattcttttggccagaactgagtcacatggccatgtctagctgcaaaggagggttggaaatgttgtcttcttttcacgtattcatgagcctagctaaaaatcagaacctgtaactgaagaaaagagaacataactccagtgactcaaattatgacacaagccagaggtcaaccagggaactcacagttcaggcccagggtgctgggctgtagccatttacacccctgctgccctaggtcctggggcttaggcaggctggtgtcatatgactcccactgtgggagggaggggccgtggagcttaaccacagtgcttggctgtccaagtacctgcaaccacagcaacggtgggtattgtttgggggagtggggggatagtctcactctgtcgcccagactagagtgtagtggcttaatctctgctcactgcaacctctacctcccagactcaagcaattttcccacctcagcctcctcagtagctgggaccataggcgcacaccaacatgcctggctaattttttgtatttttagtggagtcgaggtttcaccatgttgcccaggctggtctcaaactctttgattcaagcaatccacccaccttggcctcccaaagtgctgctgggattacaggaatgagccactgcacctggccttttttttttttttttttttttgtagctaacccagcattagcccaggaagaagcctcaacggcaagaaagtagggttagtctgctcattggcagggacaggcacagactcagaggccaacagctgcttgatgctgagaaaagtatcctcaaaatatgggtcaaggccagggactgccttttcccaggaggcagtgatgtggctgatgacagcttcttttattctttaaaattttactatagaatagcatccatgtagaaaagtacataaatcataaatgtacagctcaatgattttcacaaaatgaacacacccaagtagctagcacccagatcaagaaatagaacattatctagaactttagaagccgcccccatccccttcttcctgtcctcttcccaccctccccagtcttcaaccaccaacccccaccggcatttttttttgagacggaatttcactgttgttgcctagactggaatgcaatggcgtgatctcagctcactgcaaacttcgcctcctgggttcaaacgattctcctgcctcagcctcccaagtagctgggattacaggcgcgtgccaccacacttggctagttttgtatatttttagtagaggcgggttttcaccatgttggccagggtggtctcaaactcctgacctcaggtgatccacccgcctcggcctcccaaagtgctgggattacaggtgtgacctgccgcgcccggcccccaccagcgtttttgtaaatcagtgtaggtgattccacagtatagtcaatgttgagaaccactactttcataacaatgcttctcaaacctggctgcaagttagaatccactggggaatgtctgtcttttgaagtagaagatggaaccaagatagctaagaaggcagagtggcacttgccatggaccagctgtgtgaccttcaaggagttctttcatctctgtcagcctcatctgggaaatgggaacacgatcacattcctgcagagttggggctgagagatagaggatgtcagcccaggcacatgtaggggctcctgatacgtggcagccactattgttcttattaaaagtgagcagccccagccgggcacggtggctcatgcctgtaatcccagcactttgggaggctgaggcgggcggatcacaaggtcaggagtttgagaccatcctggctaacacggtgaaaccccgtgtctactaaaaatacaaaaaattagccaggtgtggtggtgggcgcctgtagtcccagctactcgggaggctgaggcaggagaaccccggaggtggagcttgcagtgagctgagatcacgctattgcactctagcctgggagacagagcaaaactctgtccaaaaaaatttaaaaaaaaaatagattaaataaataaataaaagtgagcagccccaggaagatgtaaagccctcacttcctttacgcagatggaacccattctggggataggggacacaggttttgttgatgagaggtcacggtccttctagggaacacagaaaaattccaagagcagcagagattccaagccgaggtggacggtatcagagaccagtggctgcggatgcacttgggcaggcccagctttggcaaagccaatcttcctttggcaagaacagtgactggctgcaggctgtgacgctaaaagctgcttatggagaaagaagcaacctttgttgagcacatactacgtgccagacactgcctgcatgccttaaattgtgggagcagtcagactgatccctttttaacagttgaggagcctgaggcttggaggctgcagtgcctgacttcctcaccgaggaaaacctggtgtccccatgagcctgggatctgcctctgttgggatgcatgcctgagggcatgctgcatacagagtgacctggggatgtgttgtttgattagatgctcatctttgtagttttgcctaaaacaaaaagtacatggctttttaagccattgacaactttattctttgcacctattatatcacatgttcattgtagaacatctaaaaaatacagataagcgaaaagaaaaaaaatcaaaatctgtcctagtcccagcctacacagatggccactgtcaatgtgtgagcatatattttcatacatgtgagtctgtttgcatgtgtgtgtagaaacttaacagaaaggagtcacatgctacacattgtcaaaatcttcgtcttcagttaataatatatagtggccatctttctgtgccattaattatttattattatttttgagatggagtttcactcttgttgcccaggctggagtgcaacggcacagtcttggctcactgccatctccgcctcctggtgagaggtgacagcatgctggcagccctggctcactcttggcgcctcctcggcctcgtcgcccactctggctgtgcttgaggagcccttcagcccgccgctgcactgtgggagccccttcctgggatggctgaggccggagccggctccctcagcctgcggggaggtgtggagggagaggcacgggcgggaaccgaggctgcgcgccacgcttgcgggccagctagagttccaggtgggcgtgggcctggcgggccccgcactcagagcggctggccggccctgccggccccgggcagtgaggggcttagcacccaggccagcagctaccgagggtgcgccgggtcccccagcagtgctggcccacgggtgctgcgctcgatttctggccgggccttagctgcctccccacggggcagggctcaggacttccagcccgccatgcctgagtctgccccgccccgccgccgtgggctcctgcgccgcctgagcctccttgaggagcacggccccctgctccacggcgcccggtcccatccatcgcccaagggctgagaagtgcgggggcaggccgcgggactggcgggcagctccacctgtggcccccgtgcgagacccactgggtgaggccagctgggttcctgagtctggtggggacttggagaacctttatgtctagctaagggattgtaaatacaccactcagcactctgtatctagctcaaggtttgtaaacacaccaatcaacaccctgtgtctagctcagagtttgtgaatgcaccagtcagcaccctgtgtctagctcaaggtttgtaaatgcaccaatcgacactctgtagctaatctaatggggacgtggagaactttcgtgtctagctcagggattgtaaacacaccaatcagtgccctgtcaaaacggaccaatcagctctctgtaaaatagaccaatcggctctctgtaaaatggaccaatcagcaggatgtgggtggggccagataagaataaaagcaggctgctggagccacccgtaacaacccgctctgattctcttccaaataatgggaaggtttttccccccgtttttacagtaagttttgctgctaatcactttggattttcactgcatttatgagctgtgacattcactgtgaaggtttaaggttttgctgttgaagctggcaaaaccacaaaaccaccaagagaaactaacagttccacaggcactgtcttaagagctgtaacacccaccatgaaggtctgcagtttcactcctgagccagcgagaccatgaacccagcgcaaggaaaaaagtgcaagtacatccgaacttcagaacatcagaaagaagaaactctggacaggccccctttaagaactgtgacaccacctgcgagggtctgcggcttcattcttgaagtcagcccaagaacccaccgattttagacacactgggttcaagcgattttcctgcctcagccttccaagtagctgggattacaggtgtccaccaccacgccggggtaagttttgtatttttattagagacaagggttttacaacattggccaggctcatcccaaactcctaactacaggtgcttctgccacctcagcttccgaaagtggtgggataagaggcatgagccactgtatctggcctcattaaatattctacaacagtggcactgcattagaatccctggggaagctttaaaaatgtcaatgcctgggttccacacctacagtcaaatttaattcatctgaggtggcctgaggtttggaattaaaaaaaaaaaaaaaaactccccaagtagtttaaatatgcagccaaacctaagagctgctaaactgcaacttttttttttttttttttttaggtggaggagtgctctgtttaccaggctggagaacagtggtgcagtcttggctcactacaacctccatctcccaggttcaagttattctcctgcctcagcctcctgagtagctgggattgcaggtgtgtacgactacacacggctaatttttgcatttttttttttttttttttttttttttttagtaaagtcggggttttgccatgttggccaagctggtctcaaaactcctgacctcaggtaatccacctgcctcagcctcccaaagtgctgggattacaggcatgagccaccgtgcccggccagcatttttcaacaagggctttgcattccatttgctgaagggggtgcgctgtaatttgatcaatccccttttcttggacatttaggttggttccaatttttatatcatcataaaccagcaattagcatgctttttctgtaaagagctaggtggtatttgttctggcctttgcagatcacaagttctctcttagaactactgagctctgccattacggcaaaaaaccagccacagacaatgcatatatgaatgcacatggctgtgtttcaatcagactttatttagaaaaacaggtggtggccagatctggcctgtgagccatggcatggttcactgaaccaactctataaacattgtgtggtacatctttttgaagccaaactttcctagtatgaaatgatcattttcttgtgacaatgattttatactgtttctttttagaagtaggacccttctttgaatgaaacttagtaagattcatataagtaacaggtaagaagtcattctgttagcataaatatattttataaattcaaatgtgcagtatttagaaggccagttaggggttgcagatgattgcctttttttttttttttttttttttttttttttgaggtggagtctcgctctgtcgcccaggctggagtgcagtggcgcgatctcagctcgctgcaagctctgcctcccgggttcccgccattctcctgcctcagcctcctgagtagctgggactacaggcgcccgccaccacgcctgactaattttttgtacttttagtagatacggggtttcaccgtgttagccaggatggtttcgatctcctgaccttgtgatccgcccacctcggcctcccaaagtgctgggattactggcatgagccaccgtgcctggccagatgcctgcagttttaaatcagactcggcaccagtgacattcaaatcaaagttttgcagaactagcaaagcaactctatggaaccccaggattccactgggaacacagtttgaaaatcattgcaataggataaattcttggaagtggaattgctggagcaaagggcctgaaccttttaaaagcagtttgtggccaggcacggtggctcacacctgtaatcccagcactcccctctgtgccgtgactcaggaaccaggtaatgtgctgagtcaggccccaggcacaggaagccacagatcagacacagctcaacaacaggcttccctgagcccccttggctcacaccagcagcaacgccgggttccatgtgcagataagtgatccatctcagtctctcccagctgacagggagttgaaggttctactcttggccctgatcctaataccagtgccaataatcgagcacctactatttgcaaaacattgggccaggaacttgaccacatcctcccttcatcctcagaacaacccgttagggagggcctccctgtccccattttctagatgaggaaatggaggctttagagcagctaacgtggcttatacaacctgcctgcagaaccttccaggtctgagctgaggtgtcatctctgaacaccaggctgctgcactaaccagaagacccctccccacctgcagtggcctcgctgcatcgtaaggatggaggagctgttgtctccacagctgacaggtgcttagtggttagaagtctggttttcgcgcggcttagatctttaacatctgaactagtcctgtcaacatattttgttatatttctggtggctttgtctttgatgctattataaatgattatcttttaaaataatactttgatgatatatagaaatgaaattgatttatttgactgtatccagcaaccttttcaaattctaataaattgtgtagggaaaaaaaagtctggcttcggagtcagaacggaattgaatcctgcctccaccacttcctacctatatgacctggtgaaacttatccctctctgtgactcagtttcctcatctgtaaaatgggaaaattgaaagcaactaacaggtttggggccgttttgcttgctgctgctgtggcttcagtgctgaggcctggcactcagcgggatgtcagcccaggactggagcttctttctcatggtattattttgaatttagatgaaaagaggtattccaggagagctcctggcacagggcctggcaggtggcacatcctcagtaaatgtgagctgctgtcagctgctgtgtgagtgcctggtgtggccctgttgtccccttgagggttgggggacaaaacaggccctcaggaagcctgcctgtgtattcgggggctggggagatctctgacctcctgtctcctagctccaccagcatctctcacctcccccagcaatgtacaaccccttcttttcccatagcttaggcccctgaggtaccagccccccagcctagggacagcccagtggcaaactcctggtgacctgggtcaagctgctgttctccaatcccaactcggctcttcccgtgacttggcccccaggccttgggtgaggctccgatgaaataacacacaggaatgtgcgctgaacactgccaagcactgcaggtgggcaggggctttgtgctccccagcgactgttcctatcctgcgggaatggaggagaccgacaaagaagccccactcctgggctgacatcctgccagtgccagccgggcctcagcaccagtgggtcagccagaacagcaacgacgaacaatgaggccccaaacccgtgggccccccactttctatcttgaatttctctgtctttcctaggccagcaatgtttgagagggagagcgagctgaagatttcctgatttcagataggcctagagaaggattgtaattttctagtgtgaaaaggaagtggcacaaagatgagggcaatgaagaagatggttcaatggaagtaccagggtcctgtaaatagggaacgtgttttatgatcaaaccgttctttgcatttttggtgattttgaggtttaatttcctctatgtagttagttaactatttaacactgagagcaggggtagggataaggcaaacaacaaaaaagccaaaatgaaaccaacttctgtggggtttccccaccccagggaggtggaggctgaggtagaactgactgagagaatcaccctccctgcactgtgatgaagacacatccacacatcaggactacacagctggcaggtgctggctgtccagaggagcaaacagcttcttccttgtgtttctgtgtctcttagtagaaatctgtgcccttgggagaaaactgaatttgcaccccttgaggcaaacacttgaccaaatgaattaggcagatgggtggatgggtgggtgaatgggcaggaggtgtgacaggcaggaggcgtgacagggaaagaacactgttctgacaggcacacactgccacatctgccctcccaacaaccccgatacagacactgttgttaaccctccttttacagatgaggaaactgaagttaatttgctcgtggtaacacagctaggcaagtggctacgttcagctggagaaaaggaaaattctgaaagactttaggatacatcttattcaaaagcatttggtgaacataaatatgtacccaaggtataatattaagtgaaccaagcttgttataaagcagtatgagtcctgtctgattccaactttataaaaaatagatgcatatgtcaataaatgcacagaaaagggtataccctaaaatgttaataatggtgatctctgggttatgacacaaaatattgattggtctttgggcttttctttaattttaaaatgttaatagacatgtattatcttaataatgggaggagccacagaaaaagtgcttttcaaaaacatgaaatcaataagcccatgcaggacctgcagggggctgcagtcacctgggcctcataggcttggcaaaggctttagttatgccctgattggaggccactggcatggagaagctgtaggtcagctaactggaactaggacatccaatgtgattggttatgtgtgcatatttgtctttcttcattgggtcctaagttgcaagcaggcgcaaaaattaaggaagctgtgagtcaatgaagtcctggctgtttttcagctggttgctatagggttgttttttgactttctagactggttgctgtagaggtgggtcagagttttactttcatctatggtctggccattgtatttgtatattcagtctcttagtcaccccttttggtcattcgcttactttcaagaggttggccaattcaaggaaagctggaaatctagctctttatcactcagagattattcagtaaactccatataaaactgtattgcaaaatattcctgacctttttgtttttgtatcatcatggtgattttgactagagagcagatgtgcagaagcttttaagaatctagatagcacgcagcatcatgtccactcttacaaagccagaataattaatagttcctataaggtgatttggaaccaggaacctcaattgccaaatcaaggccaaaataacaaatttgatagattatgggatcaaccttagccaaatagcttataccatgaaacaatatataatagttccaacttgcttgtttctttgatccaaggacaagaagtatgagcaacggcacagacaccaggatgactaaaagaaaaaaaaaaaaaaaacctagggtaatgttattgtctatcactgcccatgccaatgagttgagattgttctgtatttgtatctaggacaaaggcaatatcatcaataacttctgccagagtgagtatcttagtccattcaggctgctgtactaaaataccataatttgggtggcttataaagaatagaaatgtatttctttcagttctagaaactgagaaaatcaagataaagacgccagcagactcgaggccaggtgtgatagctcatgcctgtaatcccagaactttgggaggctgaggtgggtggatcacctgaggtctggagttcaagaccagcttgaccaacatggagaaaccccgtctctactaaaaatacaaaattagccaggtgtggtggtgggcaactgtaatcccagctactcaggaggcggagacggaagaattccttgaaccgggaggcggaggttgtagtgagctgagatcgcgccactgctccccagcctgggccggagccagactgtgtctcaaaaacaaacaacaaaataaaacaagaaaagatttaatggaagacctcaataagccattgtaggctgtaaaattcacctagtccaatctttcagagtcgttttggacttgatagtagctcagtaccaagatcattacagaagttaataccaataatagccattgaatatattgtctctataatgtggatcaaattctcatttgactgtactgacattggtgatagaaggtgcaacctgatttacgctggggtatatcaggtgattaaagttaaggcaggctagagaaaaagtgaaagcactcaaattgctgatttggagtgaatgataaagcaatttaatacaccgtctctaaagcatccgttttcgcctgtccgaagagttttaaaggatatttggccagaaaatttctaccatgtgtcagaatattaatttgcatgtatgcattcatagttcatgggatattattttagtggttttattataactgcatagaatggtttgcttcttactgaagatctttctttttttctttcgttctttctctttcttacagccataggtgctttaagtcattaaactttgagcactgtaaaaatatctaaagagtgcttatttttataacattaatactccatttgcaactttaattatagttacttcatttttaaaatctcagaagataatgaaatatgtagaattgccaaaacaattgagaaagctcactgcattcgtttggtagagctgtcgtaacaaagtgccatggactggatggcttaaacagaaacttactttctcacagttttagatgccaaaagtccaagattaaaggtattggtaggtttggtttcttctgagacctattcaattggtccatagactgctatcgtctccccgtgtctttacatcgtcatttctctgtatgtgtctgtgtgtaaatgttctcctcttagaagcacgccagtcacattggattaggacgcaccctactgaccttatttaaccttaattgtgtacttctctaaagaccttgtctccaagtatagatactccgtgatattgagggttaggacttcaacacatgaatttggcgggggtgggtgggcacaatttagctcataaaactcactaaggtttaattagggcatggactgtagagcattctactgttaatttagtttttgtgtttggaaagcattttgaaacataatgatttttatttacaatttcattatttatattttcattatgtttagggttgcttggaggtaaatgaagaaagaagagttccgcattagtgaggcagggatgtcagtatataaggaattggaaagacatcagtgataatggcaaaagctgcttataaattaaattaagagcttaattaaactgaggaaaaaagcatattgccaaattacatgcagttgttttgtaacagcatttgtccacttgctgtgccctgagatttccaaggcacattcctctactaagcgtattataagatgattaaatatgcatagtacaagtatgttatggaaggctgtgttaactgatatagtgggaccacaatagtatgtgtaagtgagatttggaaaatttgatatgccagcaaggacaaagaagtgttgaatttgcaagtttatgcacataattctgagaatccaggcagctatttctccttttgaattgttctcttggctaggggataagggtgagacacaatacacatttgaatgtgtcactgtgtaagttaccactgcaatatcttctgtatgttgaaaaactggtacttatatgtactaatactatctaccatgaaaaaaacaattaaaaatttaaaatatcatgtaaattaaataaagttcaaataccactagccagaaaaaaatattttatattatagtctggggtcagaagaggaaaaccttatgtaaagtatcaaaattaatttttatttcaatttaaatgcaccatcatataacatagtttcataactgaaattacatttgtcagaatttgatcttttcattattaaagaattgagggaaaattgatggttataatattgatatgccatgtaaataaactttttttgattgttataggaatgaattgctcaactaattggccaatgtcaaccacatatctgtttccatggaaactgcagcaatattacttcaaatagtttcatttgtgaatgtgataaacaattttcagataaaaaatgtatacatacatataccatttgtcctggatttttttttttttttttttttttttttgtgagacggagtctagctctatcacccaggctggagtgcagcggcgcgatcccggctcactgcaagctccacctcccgggttcccgccattctcctgcctgagcctcccgggtcgctgggattacaagtgcccgccgctacacccggctaattttttatatttttagtagagatggggtttcacctgtgttagccaggatgatctcgatctcctgacctcgtggtccacccgcctcggcctcccaaagttctgggattacagacgtgagccaccgcgcccggccttgtcctggattttttaaccaagcactattatttatagttgcgttaaaataaatagggatgggtttgataagtcaccacttggtgctttaaattctgccatcatcttttctaggagtgtaagatatagagatacacataagcagaaaattttttttaacatgaggataatatgataatgtaaccagtgataacctacctctctttttcaatgctttccagatgcaaattgtattgtatcaatcattcaaggacagcttgtaggactttgaagacccaagcagccaaaaaatagctaattcctccttatttcagttggtatgaagagaaggttactaataatgctgctcttccagcacaagtcttctgggctgtcagtgagcttggtcagtgggaaccacaggaaattatgagttatgtttgttatatatgagaggaaaattgaggctaccagtcttgtcacagggtttatagataattgccttgtgtgccaccatgcctggataatttttgtatttttagtagacaggggatttcaccatgttggccaggctggtctcaagctcctgacctcaggtgatctgcctgccttggcctcccaaagtgctgggattacaggcgtgagccaccgcgcccagcaccccattaaatcttatcacaaagcctcttcaaacttggctccaatggagggaattgatacttcagcaatattctgtcttctactccatgagcataaactgatgctatcctgagcaaactagaatgattaccctatgaaggttcagtaactataataggggtatttttggcattagtttgagacctacagcctgtgccaaaagtgaacaggaagcatcacatttaaaagatgtataaaatatgtctatatctatccatttgatatggcttgactgtgtcaccacccaaatcttatttggaattcccacatgttgtaggagggaaccggtaggaggtaattgaatcatgggggcaagtctcccgtgctattttcatgatagtgaataagtctcacgatatctgatggttttaaaaaaaggagttcccctgcacaagctctctgtgtttgcctactgccatccatgtaagacgtgacttgctcctccttgccttctaatacatcatctatctggttatttcatacatattttctagcattttattattggtttcttcaaaactcttcagaaactaatatatgtatattttccaccatgatcaactgtgcatattaatatatattatttggtatatgaatgtggattcataattgagattatgttccaatgagtcatagtaaaagtacagaaaattaatatttctaatgccttatcaaccgatgattattataaaattagcctttatgtcaagttctcattgctcttgaatttcattccaaacagaattttggaattcatattatttggaatagtatagctgtcatacctaaattagtttaataacccacatctaatgcaaatttacattaagattttacataaataattatggtgtagagtatgacaatcctatttcaaaaccacagagcccttagaaaaacaaattcttgatttttcagatatctcaaatactgtaaaatacagtataactaagaataattagccatgaggtcaaacttcaatttcaaacattataaaagtaaaattaagagttaaaatctaaaaccacatgaaaatttattcttcattataatctcaaatttgaaaacgttatataagatttatgcattcattagaaagtgatttattgtaattttataagatttgccaatttttaaaggtgtatttttgatcaatgcaattaaatgttaaaattattatgctatacattattagttcatgacacattttcaaatatgaatgtgatgtagaaacaggtgattatcagaaaataaactctgtttttagtttaagactaaattaaagctaccaaaaagaaatttagtttcaagataggaaagtttatttgtaaggatgctgggatgtttgaacccaagatgagtgatgtttaaaaggttttgcaatggcattcaatgaataaaaaatgtttagagttcagtaacttcagttaccattttggacagataacaagagatccaatctgactagcagagaatagtgtaagacatttagaatagttagcagtttaaatcagagggtagacagattattttccaatgtagagtacatatttctccatttgcataatcctcaccagtgggtagaatttatgaagaatagaatttggttcatggaaagaaaagcaggcaggaactaaatcagatataactttcttcatatttaataactgaagtttactcctattttgagactcaattctgatagaagttggaaaattaatctgtcagtttaaccctatctctaaccccctgccatgtagagaattgaactagccttcgctctcataagtggaattttaaaaaataatgagttacatgagctgataagcacacatgcatagtcaatgttaaggcttagcatttataaaatttgggatgataatttatggcaaatgtttaacacatttaataagataaatagtttttaaggcattgaataggtaggagttcatatgagtttactctgggttgctattacttttacatagtcaaactttattttgtagtatttttcttcttgattctctagtcactatgataattattagtatggatggtgacttttatttccaagcacagcataatccacaataacataacatttaaaagcaaaggctctgtatcgattattaacatgaacaatttcctttgctaccatactccatccagataaagaactgaatgttcctctgaaccttccaattaatttcctccattgtgatgaatcctccatagatttattggcaaaacattatttctaagtgttctccaccctactataaattgtctcaaaatagtttgtgtctaccaacaaggtagtatagactataaacttaataaatagtaattattgataattatgagataccaggatgctaatgaaactttattgcttgtattgagaaatgagagtataaattgagtataaaatgaaaagacttgaatgcttagtaaagcatataatgtagctaaagttattaaacagatatatgtatatgccaatttgaatgtctttttatcgttgttcaatgtatagaatacttattttttcctttttttagttgacacagtaattatacttacaggatacagagtgatattttgatatatctatacaatatgtaaggatcaaatcagagtaattaacatatccatcactttatcatttctttgtgttgtgaacattcagaatcctctcttctagctttttgaaaatatataataaattacagttaaccatattcaccttgcagtgttgtagaacaccataaaacattccatctagctataattttgtatccattaaccaaactgtccccatcctccttttccctacccttcccagcatcttaatactcacaatcctactccctactttcatgagcttaaattttacttaggtctcacatttgagtgagaacatacagtatttatctttctgtgcctgatctttttcgcctaatataatgtcctacaggtttatccatgttgccaggaaggacagaattccattgtttttatgaccgaatagtattccattgtgtatatagaccacattttctttatccaagcatctcttcatggacatataggttgattccatatcttgactattaggaataatgctatataataagtatgggggtgtggctatccctttggtatactaatttcatgtcctttggttatttttaaatactatttaatatgcacctttctttttatcagaaaatacatgaagtagtaaataaaataatctcatctctattttggcttttgaggaagtggcaaaaatatagttataatttggaattatttgactccaattattttgatcttaaactaataagttgcttttctggtttattcatgaaaatgtcaatgaaatatttaataatgtgtatctgtgtatttatataaggctcgtaatatcctatagcccttgaaagccaatatggctcacttactttgccatttttaagttgtctttttattaatgatttgtagaaaaactatatgtcctggatagaagtcacttgtcaggtatgcatatagtacaaataatttttttctgtctctggctttttatttttttgatatttatttacttatttagagacttcgctctgttgccaggctggagagcagtggcaccatctcggctcactgcaagctctgcctcccatgttgaagcgattctcctgcctcagcctcccgagtagctgagactacaggcatctgccaccatgcccagctaatgttttttgtttttgtttttgtattttttgtatttttagtagagacagggtttcgccatgttggccaggatggtctcaatctcctgacttcatgatctgcccacctcggcctcccaaagtgctggaattacaggcgtcagccaccgcgcccggccacctttttattttttccacgtattttgatgagcaaaagtttacaatgttaatacaatcaatttatcattctaaaacacattttgtaggtgttgtgccttctttaggaaacatttgcatattccaaagtcagaagtaatttctccaatgcgttcttctagaagacatacagttatttagccctctgtttaggcttattatccactcagttaatttttgcatttcatggaaggttggtttatttttttaatatatggaaatatagttcggcaccatgtggcaactctttcttttacccatagatttgcttggcatcttatcaaaagtaaattaaacatatatgtgtgtatgtctagttcggtaatctctattctatgctattggtctatttttctttccttagccaatactagtgtctcctgatagtgtatatttatattaaaacttgaggttctgtaaaacaaatcctccagtttcttagtctttatgaaaattgtcctgactattctagatcctttgcgtatacatataaatcttagaattcacctgtcaatttattttaaaaattctaccagaattttaattcagcctcttttgatatttgccaaatatttgccaaggagttacttgccaaaatatctctttcctttccttttacagttacacgtatggtagactcagaattctcctactggtcactgaggctctgttcattttagttcaaccatttgttaaacttttaaaccatttttttaacttataaagcaaagaaatcatttaattttcaagtcaagtttccttgatttgagctcaaataatagctcaaatcaaatagctgatggcgggtgcctgtaatcccagctactcaggaagctgaggcaggagaatcacttgaacccagaggtggaggttgcagtgagctgagattgtgccaccgcactccagcctgggcaacagagcgagactccgtctcaaaaaaaaaaaaaaaaaaaaaaaaggctgatatatggtgtgcgctaggcatgtggtaagcactgcttagtggacctcatttaatcttcccaataatccagtgaggtgggtgttactatcccgttgataggaaagaaagctgagctgcagagataaggcagaactcccaaggcctaccaggcagcagagtggggcatcatacatgcctgaccccacgcaaagaccatcactactgccagccgctgcctggctgtgtgcaggtggggagagacctaaaaggtagggagggagagaagattcctccagtcactattttctaagcaggtcaatgcttagaccaatgctgagttctgctgtgtgcccaccctggagggtcccaaggtgccaccaggtctcagacacactgagattctcagagtaagtgtggattcaacgggtgggcaacgcctagcgggggcaaacatatagagataagggagttccagaacgagtgtggccagattcagcttcccacccaaccttggacccccaggaggtggtgtcaagaggggccatggcctggggtgcgggcgtctcttcctcccagaacactagcctgaatcagccagctctgcgcacacacagccaggtccacaggcacaacaatttcctggggcccctgagggcagggggtctgctggggctggggcttgtgatgtgtggagtgagcgcaggctcagatcagggcaaggcagcttgtccagagaggcagataattcccaaacagaagacctccaaggcagagggccctggggctggactcctggcctccaggaggttgttctgagcttaccctgtggacggattggagggtggccctctttccccacaaggatcaagagggactgggggatggtgggaaggcaatctggccaggagaagctgcgggggagactcccgccatccccagtcccaccatctcagccccgcggcctcttcctccctggagacagccaggtgtggcccaggatcccgggaagtgcagcaggggagggggtggcgtcttcgctcctcaggcgctggcccggcgccaggaagccagtgcgccggggattgtctctgtcaactgcagcccagacccagtccgggaagttctgccaggcgctctccgccggtgcctccctggttatactgttatacaggaaacctggcagcgcgggagccgcgcggtcgaggagggagcgcggaacgccgagcccacgcgcgcctgccggggcaagtggaggcgaggccggcgagcggacgccccgagctgcccgggcaggcagggtcgggagtgaggcgccgagcgggggttgaggtgggaagtggggttaggggtgggggtagggggtggggaaggggacagggtgggggaggaaagggtgcggcaggtggctggtccgcacctgggagctccgcgcgcctgctccccttagttccgcgctggggcaggatctgcgcgggccgcatcccacgcgaaggagaaggtaggcgaagggctgccctccattgggctggagggcagcagggaggcccccaacgcccacccaggcgttgacgcctctgtatcttgcgtcgcctgggcggtggacgcaggagacctcctggcgactggtgcgctcctgcgctccagggatcctcccggcaccccgccccccccaccaatctctctccttctctgtgtgcccccaggtcggggaaggagccgtggccgggtccccttcttatccagcccgagacaccgcgcctggtgggcgtccctgcgctgggaatcccgctcggagtttttccaagcccggccgggctgtgcggggaaaggccctggtgagggaggcgggcccggagctggcggtctgcagtccggttggaagtgctcgcagtgggggattcagggtgcaaatgatctccccgcgagcgggaacgcccggacaagacaaccagccccagcccagcattcccagagccgcgtgcgggagggacgcagggacgcagggacagcaaatccccaggtgaggggagaagggggaaggccgggcaggggcggccccaccctccttgggttctgctagcgatcagccagcaccccttcagacgcagccctcccggctccaggccccggccttctgcttcgggccttgtcttccccatgcccccaaggtccccagcagaggccttctggcccctcctcgccccgcccagacacagctgctttgggtatcggtgacagcactcctgagtgtccctgtccctcttagctcccgttgccagctccggttccgtgcagcctctccggcttcgcccctggaagccacgcccagggcgatggtcggggcctaacctgccggctcggccccccccggcccttgggctccctgaggcccgcccagccgacgtgagtgcgctgcggggtccatggggaaggggcgccggggcagtgtcctccttggggtttgttggtccagctctgggcagctcgatgaccccgcctccgggacccagtgtgcttagtgactcagtttacactttttcctcgtcgaggaacgcttgagaaagtggcgaaggagccctacggggggcctggttggaccctgctccttcagtccctcagcctcggcaagcggcggtctcctggcccctggtccgggtcaccttaggaggcaggaggagatgtggtcagtgtgggagcttggaggggccatgcacttccggagaagaccaccgactcgtggctttggtggaggggtgcaggcagatttagttaggctctcccccatccctgacacactggagccggggcgggagcggggcttgtgaccactccggagagctttgggggcccctgctctgggactccgcacggatagtcactgtctcagagtgcattctccaggggccactctcgtggaggcatccggggggtcccagggcaggtgggcagcctttttcggggggggtgcggtgtgagagccggagagcagggggcggggcgggcccggctggggctcacgtctgcgttgaagcctctggggaaggagagagaaaccaagagaaccggttcccccgccttgacagcggaggccctcacaccgaggcccttggactaaaccgggcagggacagcccgcaggtaaagctgttctccggggcgtctgcagagcccgcatcccaaccctgacccaggggccggggcgcaggctcctggagggaggcggtgctacgggactctgcggattctctgcgggcgggaggcgtccaggcgggacagggcccggggagcggctggcaatgggctgctcttcccacttgactgatggaaaactaaggctcagtcacctgagtaagcgtggtgtcgacctcagagcgggcaatcacccctcgttttaaaaccaaagtttccctcgcagtcgatttggaccaagactacccacaatctccccaccgcaggactgaagcgaggctgaaatcttagaatcaaccccacggaatgaagaggttgtcgtaattccagcactgagtgtaagaatggaagccttacatgtgattttattcaagtccccattttagaaatggaaaaactcaggcccgaaggcgaacggcgaatgcagcatcgggactcgaacccaagtctgtccccgagtgcggggctattccaggctcggtggtcttgacctccacggccctcctccttgttgcctgcagaaaaacgccgcggccacgatgccggcgtatgtggagggggatgtctacctggtggtggagcaccccttcgagtatacccgcaaggactggcgccgcgtggccatctggcccaatgagcgctactggctgctgcggcgcagcacggagcactggtggcacgtgcggcgcgagcctggcggccaccccttctacctgcccgcgcagtacgtgcgcgagctgcctgcgctgggcaaatgacctccccgcgaacgggaacgcccggacgagacaacctgccactgccgcgccgccaggtccccccaacagtcccctcggcccccgagccgctcacctacgactaccggcttgtgagcgcggcggcggcagcgggccccgacagcacccccgcggagccccgaggccgcgccagctccctgtgcggcccttcgcaacgcggcgccgcgacccagcgcagcagcctggcgcccggcctgcccgcctgcctgtacttgcggcctgcgcagtccctggactacctggcgcgcgccgccgtctcgcctcccgccggccacctcggaaggagcggcagcttcaaggctgcagtgtggcgggttcctggatgtgcccgcggcccctggcgcgcagcgactcagagaccgtctacgaggccatccaggatgtgcacggcccgccgcgggaggagagcggggaacaggggtggcgcgctggggaccgcgcccgcacggagccggggcgcgaggagacctgctccgctcagcgtcgggcacgatgcccacctctgtctgaagacttggaatgagctccctctccccaaccgcgaaacgggagcggtgcaagcccctagtccctcatctgcgattcccaagctccaaagctgcctggaagcccagaagtttttcgtaatccaattggtggcaaaattgcgcttgaactgatgtgaggctgttgatggtctttatttgtcaaacttgtgtgaatattcatgttttgctgcagaaatgcaaatgagctcgatgaccggctgctgccccaagccctgctgggaggttatgtgacctacagcaggtgtgtgccccatagtctctttccaagtcccagctgttctgtattccgaagcgcatctgggcacggaacgggggattgcgggcttgccgccggctcaacagccttgccagtctcccaggagcctggggtcagatgagagggtggatgtgaaactcaggcgtctgcttccctttgagggtgcttccaacatttcagatgggtttgtttgggtgcttccaacattgatgggtttgtttcagaaaggcgtccggttatggtgaggttgttttttttctctcttcagaatccggttgtgttaatcagggaaatcgaaaataaagcacgttttaaaaacacgcttacatcctcagaacactctgggcgaccctgacattttgaactttaggaacttttcaaggaggggcagcccgagtgggaaaaagagatgctcagaaccgttctttcatctgccaccagctgtgtgatgatctaggggcagttcccttcctctctcagggtctcggtttgttctttagcccaaagggaggggatggacagatgaccgctgaaccttgggagcctctgatttctttcgctgtgcctgatgtcattaccatgaacactgatgcccaccatgtgccaggactgagtccgggatgcccaaacgaagagacacgcctccgtaggcccgctgctggatgttccctccgctcgactcgttacaatgcagagctcaggtttcgagactagggaaagggcaactggactctgctgggtcacctgccagttgctgacagccacttaacttacacgcgaggacgctcccccaggcccagcgtcctctggtgtaagcacaatacctaaggattagggttgtgagccctaaacgaggtaaggcttctaagcacttggcagcagcagggggtccacccagactgtccgggtcgtcctggtttggcttccttaggactgtgccgctttcactcgagctcctgcagcggcagcccgccgccttgtggccagggtggaaaacggcacccggcggacagggcaggagaccacggctgtttcctgtttcgcgcccctgccagccagcaggcagcttctctgggatggatggctggatgccagcgctcttcccccgcagcgcccctccgtttcctgcccaggctcccggtggcgcacttcccggcctctccacattctctgtcctgtaggagggttcctgcccgtctgagcggagcccctggaggtgggggaatggccttattctttgaacctcgcatccggcccagggtctggctcagacagagtgcacagagtgtgtgctgaggagggcgcaggtgcggcagccccttacctatgagccaggcctctgtaggtctgcccaagggccaccaccaggccccaggaccaaagaggaaggagactgcccaggtcctgacatctcctgagaagacagatgaccctggctgccagggcgcctgccaggtggcccctctgcccatccttcctccagctcccagcaggttcccagttgcagtggcatatggggggaggggcacaggtgatgagggcaggggacttacccggggggaactaggacattggccagagacaggctgctccttggccccacttgtggccctaattcactgtgtgacctccacaagtcactttgcatctctggtcctgtttcctaccctgtgcaatgtgctgttgcactccagcctggatgacagagcaagattctctctcttaaaaaaaaaatcttaattcagttctaattcacttctcgaggagagtcatgtatctggtaaccttggcattgttgcatgtaagagaaaaccagaaaggaagtgatagaggcttccaaaacactgtcacataaatgagctattaattgaatttttacaactggctaatgagctttagtatttagaatcaccgaattctatagagatgaactgctcttttaaaagatcatgtgtttttaaactcatgttcaatgagccgattatttcatgagggtgccaggtgacatagtgaagaccacatatgcacagagtgatagaacgctggcaggtcccaagcccttttctgtgattcttctcttacctcaccactatcctgctcttgacaggattatggtttctttgcactctcttccctttcttcagccagacctttctggaagaaatcattcatttaaattaaaaatagatatattttttatatctattttctctcaccagtatcctgctcttgaaaggcttatggtttctttgcactctcttcccttcagccagatctttctggaagaaatcattcatttaaataaaaaatagatataccttgctaggtccttcggatatttaggttcaagtgaaaaagaaggtaaagaataggaaaatgcctttaaggccaggtgctgtggctcacacctgtgatgggatgccaaggcaggcgaggatcaattgagcccaggagttcaagaaacagcctgggcaacatggcaaatccccatctctacaaaaaatgcaaaaattagccagacagattggtacacacctgtattcccagttactcaggaggctgatgagggaggatcgcttgagcccaggagttcaaggctgcagtgagctgagatcaacccactgtgctccagcctgggtgacagagcaagaccctgtctcaaaaaaacaaacaaacaaaaaagcctttaaggcccaagaaaattcatctagacagtagttctgttttgggaggcttgattttttttaattactatgggaaatttaaaactacacaaatacgaagagaataatgaactcccaagcaaccatcattcagctgtgacaattatcaaagtttatcacttttttttttttgagatggacttttgctctgtcacccaggctagagtgcagtggcatggtctcagctgactgcaacctccaccttttgggttcaagcaagtctcctgcctcagcctcccaaatagctgggattacaagtacctgccaccacgcccagctaatttttgtatttttaatagacacagggtttcgccatgttggccaggctggtctcgaactcctgacctcaagtgatctgcctgccttggcctcccaaagtgctgggattacaggcgttgagtcactgctcccagccaaatttatcactcttggttcagttgtcactgaccactttttgaaatcctatagtgttttaaaacaaatcccagaaatcacgtttcaccagaagttcagtatgtatctctatgtagacattttttccataaccatcatgtcattatcacactcaataaattaactgtaattaacaaattaatcatctgattctcagtccatattccacttgccctagttttcttagagatacctttttactgttagcagtaaaccaggtccaaacaaggccacacattgcacttcattatttttcttcagtctttttattctgttatataaacttcaaggagtccaagaaccattgaaatagattacaaaagtttatatacatacttttttccttggtagaggatcacagtatttatccatttctaatagggttttgtgacacaaagtatgttagaagccactgatgtggactttctggaatcatcaaattgtgataattcttcatacatgaagttttattattttttgtatgtgtgtgagactggctggagtgcagtggcacgatctcagctccctgaaacctctgcctcccaggttcaggcaattctcctgcctcagcctcccaagcagctgggactacaggctcgtgccaccatgcccagctaatttttgtatttttagtagacaggatttcaccatgttgtctaggctaatctcaaactcctgggctcaagtgatctgcccacctggcctcctaaagtgctgggattacaggcctgagccaccgtgcctggctatcctcttcaaacaaaatatgggcatttccattggcctaggtcttcatcttgcctactttattgacttacattacttacctggtccttggagacatatacacatttgtcacccttagtgctcaaccaaattgtattgaatgcatttatttggcaattagttcttgtattttaattttcatttcacatatgtgttccattttcctaactagattgaaataagccatttgatatacagaatcctgttaggcatttttctttcttttcttaaaattttgaaacagggtcttgctctgttacccaggctggagttcagtggtgcaatcacagttcactgcaacatccacctcccaggttcaagcagtcctcccacctcagcctctcgggtagctgggaccacaggtgcacaccaccatgcccagctaattttttcaaaatttttctagagacgaggtcctgctatgttgctcaggctggtcttgaactcctgacctcaagctatcatccggccttggcctctcaaaggactgggattgcaggtgtgagctaccacgcccagccaactatttttctttaaattacttttcggttgtcacttctctcaataaatattaatatgtacctttcttttatctgaagagctgacctcaaccactcagggttgagtcgctgtgataaggtttgagggtgcctgaaatgtcatcatgattcgtcctttgggctaagctgaaacctagtgacttgtcaggtcaataaattaaggttatttcccaataatacaaacatttaacaccgtgaagtaggttttaggcaggattccctcttttccactgcaaaggagaggtaagttcttgctgaggtggtcaaagtcccacctggggcactgggaaggtggcgggacattggaacgtgcagtagttgcgttctggagtttactgaggctttccaagtgggcattccacgcaacaggtcttagggcgcccctccctccgggcgtggcagcccggggcgtggctcctggcaaggatccggagcagctgtcatcggagtcaatttcaggactccagctccaagctttggggtttccaaaattctgggggcttgtctccctgtcccccccccgccccaagtttccctccgtcgctggcgctgtccggtgccttcggtcgctcgggccgcccccctcagcgacttttttttttctttctctcgctggctctttcagcatcagtttccctagggggcgggaggggaatgatatttgggggctcccctgccttcctctccgagccgcggaaggggagacgcggggaggaggtctggccggctttgggctccagccaggggtccgcggagactggtctccgaaggcctttgacgccgggcatttcgcgagctacgcgcccctctcagccgcgccatccgcgccccgagtccaggcgcaccgcgctgcgccgagcccaggcgctccgggctccgcgctcccgactcgacgcccccgcgctccccctagcggctgccgcgccgcctcactcggtctcaggctcttctgtggcgcatctcacgtgaccgcgctgcgggagagggatgaaacaagagggcggctgaagccgatcctgagtggggccccagcaattcggaatgagccttttccctccacccgcttctgccgaccggggccctcccgcgcggcctcgcaggcctccccacccgcgcccgtccctcctcctccgctttcccttctcccccgtcctcggctccgacattaggggcaggcggggcaggcagcccaagcagcctgcggcttccgctgcggagcgctgcgccccggcccctgccccggcccctgccccggccccgccgccgccgccgcccaagtccggacccatcggggggctcagctcgcggcaccgcgagcagcaggggcaggtgggccgccgccgccgcctaggttgaggcagcctccaagccgtggctgagctcgcccaggggggagcagcagtagccggaggaagccgccgctggtcccccaagcaccagcgcccgggtggaaggggcgaggaggcgggggcggcggcggcggcggcggccacctggcccggaccaccgcggcccggagggccgtgaacaaagtggtgtacgatgaccacgggagctaggaggaagaggacggcgacgtcgaggagacccaggagtctgaggacaacgaggagcatgagatggaggaggacgaggctgattccgattatctggaggagctggaagacgacgacgacgccagttactgcacagaaagcagcttcaggagccatagtacctacagcagcactccaggtacccacccagcccagttgctgcagactccttccccacctcctctgccctccccccttgctcactcgtgtgctgtgcatcctgctccgatctccccccaaccccgcctcccccccaaacagaggggaaatgcgagggcacatcaagtggcaaaaaactagatttacaagaggaaagaggcgcattgttaaaaatggagattgcattgttgcagtttgcaggctacactcgctcgctctctctctcccccccaacctcctctttttcctcttcaaaatttgtgccagtgcagtgtctccaccgggcaggattgaaactttggcaaacacgtatccattgcattcatttctttccccttgttttggtctggttttctggaatgaaagaagcctcttgttttacaaacctctttgcatttctaatgtggtttctttcagatttttattagatatgttacttaaaagggaattaagggtttggacagattgtggcacacaaacacacacaaaaacatgtctgttttcacatccctagctgtggttttaaaattgtgttaaggaaatggatcatttgggttagtaggggaattttatctggtcctgtatgtttgcttttattcttcgagtgctaatgggcctgtgcaacagttgctggtaaatggctgattaaaaagcaaagcagaaagccaaacaagacccacccaactttggttattcattcgattcaaaattgtttttggttaaatcaaaaatgaaagtacaaaaccgcaggaacgcgcatcttagctcatttgatcgctttgccttgcttgggaaatgcagtttcgtgtcacctgttgcagaagatatgtagttgatcatctagacataattgctgaagataaacttttggaccaacttctaagtcacacagcatcattatcagatttattacacaacgacttttttgttttcactctatttctgaggaaaaagccttcccgaaatccgtaatgaatttctccatggtaacccctcttctgttttcacacagaaaagtttctctagactgttgctaagatgcattttgttaaataccccccccccacaaaggctgctttgtattaaatacgtagttggaatttactaaattgtgaaattaacgtaaccgaagcaacaaccggcaagacttttcctttataattttgcaaatctagattaattaaattagaatctgtttttaaaagcattaaaaaaataaagtttatgagaaaatacttgtgaggaaaaaggacccttttttccttgaagtaaggtgtgtcatgtctttctcagagagactgctgtagtagaagtggttaacttgaaaagtttctgatttttcataaatgcttacttactggagaagtagagtagtattatcttgagccaaatataaacctacgtaggttgtcctaatgagaggtgacaccgtgctggcagccctcatagccctccctggctgtcggcgcctcctcggccttggcgcccactctgggcgcgcttgaggagcccttcagcccgccactgtactgtgggagcccctttctgggctggccaaggctggagccggctccctcagcttgcgggggaggtgtggagggagaggcgcaggcgggaaccggggctgcgagcggtgcttgcgggccagcgtgagttcccagtgggtgtgggctcggtgggcacgcacttggagcagccggcaggccccgccggccatgggcagtgagaggcttagcacctgggccagcagctgctgtgctcaatttctcgcagggccttagctgccttcccacggggcagcacttgggacctgcagcccgccatgcctgagcctcccctgcccccgtgggctcctgtgtggcctgagcctccctgacgagcaccgccccctgccccacggcgcccagtcccatcgaccaccctagggctgagaagtgcgggcacagggcgcgggactggcaggcagctccacctgcggccccagtgcgggatccactgggtgaagccagctgggctcctgactctggtgggggacttgaagaacctttatgtctatctaagggattgtaaatacaccaatcggcactctgtatctagctcaaggtttataaatgcaccaatcagcaccctgtgtgtagctcagggtttgtgaatgcaccaatcgacaatctgtatctagctaatctagtggggaggtggagaacctttgtgtttagctcagggattgtaaaggcaccagtcagcgccctgtcaaaagagaccactcggctctctgtaaaatggaccaatcagcaggattttgagtggggcctgataagaataaaagcaggctgccccagccagcagtggcaacccattcaggtcccattccacattgtggaagctttgttctttcgctctttgtggtgaattttgctgctgctcactctttgggtccacactgcctttacgagctgtaatactcaccgcgacggtctgcagcttcactcctaaagccagcgagaccacgaaccaaccaggaggaacaaacaactccagacacgtcgccttaagagcggtaacactcacctggaaggtcaaggtctgcagcttcactcctgaagccagcgagaccacgaacccaccagaaggaagaaactccaaacacatccgagcaccagaaggaacaaactccggacacgccgcctttaagaactgtgacactcagcgcgagggtctgcggcttcattcttgaagttagtgagaccaggaacccaccaatgctggacactaacataaactggaaaaaggtaatttgttttgccggatggtcagaatcgttgccagacttgtccggggaggctgtatggagaataaaaggaatgaattcagtgtcagatatttatgtcttatatgtagaaaggactacatgtaaatttttgccaacttaattttagtacttttttttttttttttgatggagtcttgctctgtcgcctaggctggagtgcaatggcgcgatcttggctcactgcaacctccacctcctgtgcttaagcgattctcctgcctcagcctccccagcagctgggattacaggcgcccatcagcatgcccggctaatttttgtgtttttagtagagatggggtttcactatgttggccaggctggtctcaaattgctgacctcaagtgatccgcctgcctctgcctcccaaagtgttgggattacaggcgtgagccactatgcccggcctttagatgtgtcttgtattttgcatgcaagcgtgtgttagtgatggacttcttttgtaaaataatattatagaagaaaataattgtgggtgtgtgtgtgtgtgtgtgtgtgtatatgtatatatatatatatatatatatttttttttttttttatacagagtctcctctcaggctggagtgcagtgacgtgattctgactcatggcaacctccacctcccggatcaagtgattctcctgtttcagcctcctgagaagctgggattacaggtgcctgccaccatacccggctaagttttgtatgtttagtagagatgaggtttcaccatgttggccaggctggtcttgaactcataaactcaggtgatccaccccctttggccccccaaaatgctgggattacaggcttgagccaccaccccagccccagtatattcttttgattttaaaaattaaaatattataaaattaaaacccaaaccacaatgagataccacttcacattcactagcagggctgtaatgtttaaaaaaaataaaaataaaaagtgttggggaggatttggggaaattggaaccattatgtattgttagagagaatgtaaaaccatgtaacactggaaaatgctttggcagttactcaaaaagttaaacttagagctactatatgacccggtaattctattcatacatatatagtcaaaaaagaattgcaaacaaatggtcatgcaaaaacgtatacacatatgtatacagcagcattattctcaatgaccaaaaggtggaaacagcctacatgtgcattaactgatgaatggataacccaaatgtgattgatccatataacagatacattattcagccttggaaggaaattccgacatgttacaacatggagaacccttgagggcattatgctaagcgaaataagccagtcaccaaaggacaaatactgtgtgattccactcatgaggtacttagagtgttcaaattggtaaagacagaaagtagaagggtgattactgtaggctgggagaaggagagaatggggagttagtgcttaataggtacgagtttccatttgggaagatgaaaaagttctggagattggttgtacaacaatgtgaatatacttaactctactgaattgtacacttaaaaatggttagagacaaccaggtgtggtagctcatgcctgtaattccagcactttggggggccacggtgggaggatcacttgagtccaggagttcaagatcagcctgggcaacatagagaaatcctgtctctacaaacaatgcaaaaattagccaggtgtggtggtgtgtgcctgtggtcctagttacttgtgagactgaggtaggaggatcacctgagcccaaggaggttgaggctgcactgagctgtgtttacaccattgcactccagcctgaaagacagagtgagaccctgtctcaaaaaaaaagggggggggggaggtggttagagtgtaaattttatgttatgcatactttaccacaattttcaaaaattatttgaaagaagccacacacaaaaatcttgtttagtgaaatcacgtattgtatgatttcgtttatatggaatgtcccaaatgggcaaattcacaggaagtaagtaaatacttgccaggaaatgggaggggaaatggttgagtagggccagtgattctggggcttctttctggggtgatgaaaatgttctggaattggccgggcacggtggctcacgcctgtaatcccagcgctttgggaggccgatgcggtaggatcatgaggtcaggagatcgagaccatcctggctaacacagtgaaaccccgtttctactaaaaatgcaaaaaaattagctgggcgtggtggcgggcatctgtagtcccagcaactcgggaggctgaggcaggagaatggtgtgaacctgggaggtggagattgcagtgagccaagattacaccactgcactccagcctgggcaacaaagcaagattccgtcttaaaaaaaaaaaaaagaaaaaatgttttggaattaaatagtggtgatggttttacaaccttgtgaatactatactaaaacccactaaattgtgcacttatttaaaagggtgaatttatggtgtataaattaattatatctcaataaaaataaaaagtggtatgaagaattgggaaaacatatgtatatgtatatatatgtatatatgtatatgtatatatatgtatatgtatatatgtgtatatgtatatatgtatatgtatatatgtgtatatgtatatatgtatatgtatatatgtgtatatgtatatatgtatgtgtatgtatatgtatatatgtacatgtatatatatgtatatgtatatatgtgtgtgtatgtatatatatatgccttgagtcttttttaatcagttccctttgtccttttaagttatacccaactgatactatattatcataaggtttccagtccagatctatctgtatatctttatctctatctatatatatctgtatttatatatctccagaaaaatatgcaaaatggcttgctgattttcttttgattttaaaacttaacatgtttttggccaggtgtggtgacccacacctgtaatcccagcactttgggaggccaaggtgggtggatcactttaacccagtaattcaagaccagcctgggcaacatatcgacacccccttttctacaaaaaatacaaaaattagctaggcatggtggcacgtgcctgtagttccagctacttgagaagctgaggcaagaggattgcttgagcccaggaggcagaggttgcagtgagccaagaatataccactgcactccagcctgggtgacagaaccaaatcttgtttcaaagaagaaaaaaaaatctacccttgaagtggcttatgcctgtgatcccaacactttgggaggctaaggcaggaggatgccttgagcccaggagtttgaggctgcagtgagctatgattatgccattgcactccagcttgggagacagaaagagaccttgtcacaaaaataaataatttaattaaataattttttttcttttctttcttttttcagggtctctttcaccctgtcatccaggttggggtgcaacggctcaatctcagctaactgccacctccacctcctaggttcaagcgatactcccacctcagcctaccaagtagctaggattatacaggtgcacaccaccacacctggctaatgtcttttgtttgtgtattttttgtagagatgggggttttgtcatgttgcctaaactcctgggttcaagcaatccaccgacctcagcctcccaaagtgctgggattacaggagtgagccatcgcacctggccaattttttccttttactgtgtctgtggttccacaacttccttttttcctgttctctatggactttctacctcatttggactctgcttagattggcctagttctctttaatcaaatcttcaggaaccaattcattaccattaaaaatgatctaacaagctttattttttatcattgttaaaaatcctcgttttgagtaacacaaccacaaagtaaagaatgttatcattgatttaaccagtaaaagacaatacttaacaataaaattttaaaaacatacgccagccggcttacctggtgaaaaaaatgattgcggctgcaagctgcatttgccagacaatggttttagatttgctgtgcacgctgaacgccatgaaaaatggactgcctggcctcttcataaggaaatcaattacttgcctctttctgagtgaaaagaatgaaaggatttaaaaaatcataataaccaaaatggggagaataaaacaaactgggcagagggatgggctactttgcgtcttcagcttctgaagtcttcaaagccctcttccagttcttagaattaggtcacatgaaaaaatctggtaggatgaaatgagtgtcagagcagggaatggaaaggagagtagaaactttatcaatgtgctgtcgagaggtctgaatccacactgattcttgattctttgtggctggaagcttacggaatcttcgctgtctatggtgttctgcagttttacagtgatacgcccttgtgtgggccactttcatccacgaggtatttttggtgggcgttttcaatctggcaattgtgtttgattctgagaacttctcctgacaacttcctcttttccctcttgtatttatcttgagctatgattttattgaacgttggacttcctattttggtcttctgacattcttatcatttctctccagttttcctctttgtctctttttctttttggggtatttgtatgtgttcaggtttttaagatttccttatcttggtcgtccaaccctactatccagtttttcctttctgctaccatatttttattatctaagagctcttttgtttttagaatcttcctttaaaaaaattagtaaaatcctgtttctgtgtcctggatatagtattttctcttacttttctgaggctattaatgacaggtttttttttttctcctctgtgcatggtctgtttcttctaagttgctgcttcctattcttttttttttttatttcttcctcagatgtttattaattcttaattttctgcttctcattaacatcgtggtactctgtagccagttggaagctctgagcaagtgggtgggccttatcaattttgacttaaccattggatgattttcattgtctcttttattgggggaaatccctcttgtcagtatcttgaggtctgtcctcgagagtaagctctagaggagcgatggcatggaaaggccttttcctgtgtcctgcttgaagcatggaggtcttgctggtggtattctggtggctgagtggtggaagaaagcttcatttattgtgcacacagcatttactatgtatatcgtcacttaaatcctcagttttctgtacagtacctttcttcacaactgagcgtggtttctcccagtccagggaacctcagtttacctcctctagagactagacctttggcagcttgaaggggagagagatggtttaggaatctgctccagccagttccctattctagagacacccctccttgttatcattgcgttttgaggattgtgttctcaacttcaccttcctttttagttggagatcagactttcttgagtctgctgaggcagtaatcacttgttcatctactttcagaattttttttttaattgtgtgtctcctactttatccttatgagttagtctttaacaatttttttttttttgacagggtctcactttgtcacccaagctctgaactgcagtggcgctatcttggctaactgtagcttcgacctcctgggctcaagcagtcctcctgcttcagtcccgcaaatagctgggactacaggtgtgtgacaccacgcccggctaatttttgcattttttgtagagacagggtttcaccatgttactcaggctggtctcgaacttgtgagctcaagccatctgccctcctcggcctctcaaagtgctgggattataggcgtgagccactgcgtccagactaacaatatttctttagtatggttttaagaaggtttcaggagggagcaaaatgaaatctgtcaccttaacccagaaactgctaagagaaacaatacataaggttttaaatgtatattctatgtcttttggtttggatcagatattttaagaaatatgtgtaaaatatgtgtaacttttttcttttcttgctcccttacctcccaaacatctggtcatggtattcattgtgccattttttgcttttgtctttgttttaacatttcactgttgaggtggtaacatggaaacctttgtcagcaaggtcattccaaatggtgaaataactgtaaccacatttttaaagtttaaagtttactgctctcaggaagctgaggcacaggaatcgcttgaacctaggaggcggaggttgcaatgagccgagatggagccactgtactccagcctgggtgatggagtgagactctgtctgtctccaaaaaaaaaagtttactgctgtgttgtcattgtaagtggaaattcagtgatggctgcctgtcagggagcccggtgcttgtactctgtatagacattcagcagttatagcaggtcacattcacgcaatctcaagtgccctcttgaaaggagctcatagtcatcaggatggctgggaacaaattaggaagtaagtgaaatttagtccatgctccaattctcccattcctgtgccttcctttctgtgctgcttgtccttaccctttggatattcactctcactgcctctttctttccctgtgctgccctttttggccagatacagaccaaaggtgtcttgtccacatacagaaaaaccttgacatctgtaaggctcattacacagtaatcagtggtataggtcttagtttcagagacctgtaaaaagaagtagttgtgataagttagtaacagccaagagcaacatttagtgagcacttcatgcatgcctcacagtgtcctaagcattttatgtattttaaaattaaacctcccaacagcccaataacgcaggtactatatttttaaattttattttacttttaattaatcacttttggagacagggtctcactgtcgcccaggctagagtgcagtggcatgatcatggctcactgcagcctcaatctcccaggctcaggctgtcctctcacctcagcccccctaggagctgggactacaggcatgtgccaccacgcccagctgatttttttattttttattttgtagaggtctcactgtgttggccaggctggtctcgaactcctgggttcaagcaatcctcccaccgcagcctcccaaagtgataggattacaggcctgggtcaccatgccctgccttgcaggcactatttttgtctgcattttatagatgaagagactaaatctcaaagaggttaaataatttgcccttgatttgcccaagatcctatggctcttaggaggtagaacctggaatttttttcagaacgtattttatgagagtattttcaataccttattttatactgtagtctatagagttttcaaaccatcttcttgagaaatctgcaacttgcattgttttagctgttaaaaccaatgcttataactcgaggagaaagatactgtaatggtttttgttatatctgcagtgagtatttatgaaatctttaggccgggcacggtggctcacgcctgtaatcccagcacttcgggaggctgaggcgggcagatcacaaggtcaggagtttgagaccatcctgcctaacatggtgaaatcccatctctactaaaaacacacaaaaaaattagccaggcgtggtggcacgtgcctgtagttccagctactcgggaggctgaagcaggagaatggtgtgaacccgggaggtggagcttgcagtgagccgagtttgcgcccctgcactccagcctgggcgacagagcgagactccgtctcaaaaaaaaaaaaaaaaaagtctttaaaattttgaaataaaggcgttttaagaaaatctcaactaagtggcctttcagaaaagttctgtttcctgatatatcagtatcaatatatgaaacagcattcagggaagcaaaatatatactatttgatagttacataaatgcaaacctttgaaatcacatgactcagatgacaaatacctgtgggtgaatttttgatacattgtcgaggaaatcaaatattctgtttttcttagtggaacagtaaaattctttactcaagttatatttgtcaataaaactgttcatttaagtttatttgctttaaaagctatagtcgtcattcaaattgccttttttgatgcataataaagtgcacagattttaaagatgatttcaggcaaataggattatctttttccatgctgtgatatcttgagtatttttctatgtaaagtcaagtaggaaactttaaacatagtgataattaagtgttctgtgtcaacaattttgacaaatctgaaagattttacatcttttatgaaaatgagattaaagtaatttcagtttaactgtacttttgtggtagattacatgtggactcctcatgatagttttaaagccatgtaaaattttcacacagtttatagtatgcagaggttttaattgtaatgttagcaatttatagaaattaagttttccattattgcttttatttaataagtgcttaaaaatatgttatttgtataggttagtgaagcatataataaaaaagattttttttttttttttttttgagatggaggctggctctgtcgcccaggctggagtacagtgacgtgatctcagctcactgcaagctccacctcccgggttcacgccattctcctgcctcagcctcctgagtagctgggactacaggcgcccgccatcacgcccacctaattttgtgtatttttagtagagatgggatttcaccatgttagccaggatggtctcgatctcctgacctcgtgatctgcctgcctctgcctcccaaagtgctgggattacaggcatgagccaccgtgtccggccaaaaaaaaggttcttatacatgaatttatggtccacctgaggaaccaagacatattcagcatataacttagaggtcagttttcattcattatgtaagtgggccaatctttgttaactattgcttttatcctgtcaatctttgctctgaaattaggacctactaaaatagaaatgggcagataagattagcatgtttttctgtcactgtccattctaaataaaactacgtgaacacagcattatgttttattttttttttgtagagacagagtctcactatgttgccaggctggtctcgaactcctgggctcaagcgatcctccagccttggcctcccgaagtgctaggattacaacaggtgtgaaccaccacacgcatttaagcagcatttaaaatcaatctatattcttttcattttccaaatgaactaaactatacttttaaatctatacagctttctactcccctttctagctacaagccacatgtgagcttattgactttagttgccatcagacctgtgtctgaattccttctgtccacattcagttctgtatgtccagcagactcctggacatgtctgcaaagcaggcacctcaaatgtgtttaaaactgaactcataatttccccccattacctactcttcatctagtgttctcatcttagtaaatgggattactgtcccaccagctgctcaagctagaaatatgagaataaactttttcctttattgtttgctatgcctttaaaataaatattgaatcagtttctctccattcccactgtccctccgtgatacaagccagtgtcatctcgattagactagtcggtcacccctaaagtggtctatatgtaaccccctacctcaaccctccaagatttattttttattttttgagatggagtctcacccaggctggagtgcagtggcccaatctcggctcactgcaacccccaaaaattcaagcaattctcttaccttagcctcccaggtagctgggattacaggtgcacctggctaattttgtatttttagtagagacagggtttcaccatgttggccaggctggtcttgaacgcctgaccttgtaatccgcccgcctcagcctcccaaagtgctgagatgacaggtgtgagccaccgtgcccagctgcatcagcctttttctaaccggccttcccttccagcttcctccactctagctaaactagatggcttctttgccccacacctctcacctcttctgtctggttctgtttgccacatggcaaatcctactcatccttcaagacccagttcaagggaggatatcccaattgctatgcatcctgggctagaagcagttctttctctgagtacttatcccatgttactgctttttcagggaacttaaatcattccacattactgctattattattattactattatttattgagatagggtctcactctgccacccaggctggagtgcagtggcacagtcataggccactttcgctttgacttcccaggtttaagtgatcctcccacctcagcctctcaagtagctgggaccacagttacgcaccaccacatctggcaaattttttttttttttttgtagagatgaggtctcgctatattgcccaggctggtctctaactcctgagctcaaacaatctgcccacctcagtctcccgaagtgctgggattgtaggcatgagccacctcgcctgacctctgtaccttattttgaagctattattgttcatagattcttagctcctccactccactgtgctgtgaactcgacattgctacacagatgctcctgttaagctctttgagtgcccatcagattcaatctaattcaaatctcaatcaaattgtgatgagaatctgactgtggaggagtggagagaatgccaccctgccagtatggagactggctctccagttttatagcatatgaattatatctcaataaggctgttcaaagaatctgagacttcagtcactccacaaagttagcaaagagattaaaagtaaatatggcaaaatgttagcttttctgagtgatgggaatcacaaaatattttgtcttctttatacttctctgttttctaaattttctacaaagagcattggttacttttatatgaagaaaaaacttaataaacatttagaggcagaagatcagccctgcatttgacctgcaaagactatgcctccccttgctttacaagagttcacctactgcattgatctcggtcatcacatgtgtaactatttgtcttccagtctgacttctagattagactgtaagctcccggaagtcagagatcactgtatttgtctcatttgcctctgaatcctcagtctagtagcttgatgggtatatacccatcaagtataagtgctcaaaaaatgtttgtagaatttaactgaatttgttaaatgtctactatgtcacccatgtgctggacactttgggtgataagaaaatgatccacttatggagttgaatttaagatgcttccagtccagcaggggagaagacacaggtgcataagtacttaagccaagataccattcgaggggactagataaaatgctccaacccttcagagaaaggcaattccttccatctacgtgcaatcagggacactttttttctttttctttctcttttttttttttttttgagacagggtctcaatctgtctcgcccaggctggggtgcagtggtgcgatctcggctcactacaacctccgcctcctgggttcaagcgattcccctgcctcagcctctggggtagctgggattacaggtgcatgcctccacgcccggctaatttttgtattctttagtagagacaaggtttctccatgttggccaggctggtcttgaactcctgacttcaggtgatccacccgcctcggccccgcaaagtgctaggattacaggcgtgagccactgtgcccagctgtttctttttcttttttgaggcagagtctcgctctgtcacccagggtggagtgcagaagtgggatcacagttcactgcagccttgacctcctgggtcaagtgatcttcctgcctcagccctcagctcccccccccgcccccccggtagctaggaccccaagtgcatgccaccgtgcccaactatttatttatttatttagtagagtcagggtctcactgtgttgcccaggctggcagggatacttttgtggaagagaaggcatttgggctggggctttaaagatgtctttaatttacctagacctaagatgcaggaaagggtgcatgccagatggtggaacattgcgtcagtaagaaagccagaggcagggcacggtggctcacgcctgtaatcccagcactttgggaggccgaggcaggcggaccacgaggtcaggagattgagaccatcctggctaacagtgaaaccccatctctactaaaaatacaaaaaattagccgggtgtggtggcgggtgcctgtagtcccagctactccggaggctgaggtgaacagaatcgcttgaacctgagaggcagaggttgcagtgagccgagatcacaccactgcactccagcctgggcgacagagcaagactctgtcttaaaaaaaagaaaaaaaaaaattagccgggcatggcacatgcctgtaatcccagctactcaggtggctgaggcaggagaatcatttgaacctgggaggtggttgccatgagctgagttcgcaccactgcactccagactggatgacagagtgagactccatctcaaagaaaaagaaaaacaagaagcagaatgacacgacctcagcggtattacagtaatcccagtgagggtgacaaatggccagaggctagaagtaaagttagggctgctgaggtacaggaaaagcaagatagctgagcttatacattagcaatggaattagaaggaggtgaatgaaaaggatacttcaggcagaaaactggacggagcacttggaagcagcaggtggagggaagagggtgaaacccagcaggctccccaggtttctggtggagcaactggatggagccattcctgaaataggacgtctagggggagaaacagacttgggtgggccaggtgggctctgagggacatgctcagtctgaggtccctctggggtatctaactgcagctggatctacaggtctcaagctcagtggagaggtctgataaataaaagcacagaatgtaagctacacgcacagtggctgaagccgtgggttgtagggagattgttctagggcagtggtccccaacctttttggcaccagggactggttttgtggaagacaatttttccacggaccgggtggggatagtggatttgggatgattaaagcatattacatttatttctgttattattacattgtaatatataatgaaatatataatgaaataattttacaactcaccataatgtagaatcagtgggagcagtgagcttgttttcctgcaactagacggtcccatctgggcttgatgggagacagcgatagatcatcgagcattagattctaatatggagtgctcaatctagatccctcaaatgcgcagttcacaatagggtttgcactcctaagaaaatctaatgccaccgctgatctgacaggaggcggagctcatggtaatgcgagcaataaggagtggctgtaaattcagaggaagctttcctcattcacccactgctcacctcctgctgtgtggcccagttcctaacaaactatggaccaatacgggtctgtggcccagaggttggggatccctgtcctagggaactgacttcctagagtcaggagagaagtgggcttgcaggaaaccttgccttcaagaggaggacagagaactgtccaagtaggagcagcagagaggcgtgtgctctcggagggaggggtatcaaggaagccaaggaggaaattgaggaagagagagagacagagacagagaaataaagcaagtggtaagatattaattgtccgttattctaaggtgttcatgattctcttctttcaaattttgtgtatgtttgaaactttccatcataaaaagtcagaaagaataaggagatcatgccctcattggggaaaggttgtaaacatagtcagtttcgaagactgggcttgagtagagtccacaccagaaggcatgaaggactgagttatgctggatccatgacatcaagatctttcatctcagccagaagcccctcgtggcctcattataatgaagccctgcggggcagcgctttcttgccagccttactgtgctccatttctttaatggcctttttgctcaacagtacaagagatccaaactgctgattccagcataagacataactcactacatttttttcactcaagccttcaattctaactaatggattttcttttctttttttcttttttgagatggagtttctctcttgttgcccaggctggagtgcagtggcacgatctcagctcaatgcaacctctgcctctcgggttcaagtgattctcctgccttggcctcccaagtagctgggattacaggtgcctgccaccatgcctggctaatttttttgttgtttgtttgtttgttttgagacggagtcacgctctgtcacccaggctggagtgcagtggtgtgatcttcgctcactgcaacttctgcctcctggtttcaagtgattctcctgccttggcctcctgagtagctgggattacaggcgtgcaccaccacacccagctaatttatatatatatatatttttttttgaaacggagtctcgctctgtcgcccaggctggagtgcagtggcaccatctcagctcactgcaagctctgcctcccgggttcacgccattctcctgcctcagcctcccgagtagctgggactacaggcgcccgccaccacacccggctaattttttgtatttttagtagagatggggtttcactatgttggccaggctggtaatttctctatttttagtagagacggggttttgccatgttggccaggccggtctcgaactcctgacctcaggtgatctgccagcctcagcctcccaaaatgctgggattacaggcgtgagccactgtgcccgctaatggattttctagagaattgctgtgctgcatttttcttttattttgtaagattctttaaggaatgagagtagggtgcttctgtgatcggtaaacaagaacatgggctttaccataagagggacttggattcaaatccaggcttctgtgtttactgagctgtgtggccttaggcaaatgccagcctctctgcgtgttgcttgccttacctataacacctatgcggcagtttcagtttattgttaaacatcaaatgcagaaactgctgcagtgccaggcatgggataggaattgggggtagcttttttttttttttttccctagagacagggtctcactctgttgcccaggctggtgtacactggtgcagtcatagctcactgcagcctgctgggctcaagtaatcttccagtctcagcctccccaggagttaggactacagaggcgtgcgacaacatctggttaatttttttaaattttcttagagttggggtcttcctatgttgcccgggctgaggggcagctatttttatttttatctgcttctttttcactcccttttttttgcctgccttctttcctctctatctatcatcctctttgtttcatttgggtttttgctttggcagtttccccccaaagaaactggaaaccaggctgggcgtggtggctcacacctgtaatcccagcattttgggaggcggaggcgggtggatcacctgaggtcgggagttcgagaccagcctggctaccatggtgaaaccccgtttctactaaaaaaaaaaacacacacacacaaaaattagctgggcatgctggcgtgcacctgtaatcccagctactcaggaggctgaggcaggagaattgcttgaacttgggaggtggaggttgcagtgagccaggatggaaccactgcactccagcttgggtgaaaggtgacactctgtcttaaaaaaacaaaaacaaaactggaaaccagtgtgtgaaattgacgggctgtagcatcacctttgccaccctgcagtgatagaggagctaaaagtcccctgagagagcagtcgtgttgatggtggttgaagtgggagggtggaaatggagaagttcagccttatattaataggatctgtaagtaaaattcacaagcaccccacccgtgtggttggctgagcaccacaggtgtaaattattattaactccatacccaacagaattcagctctcctctatttttactataggaaaacacacaatagctgtgtattttgatttttaatttttttctttttccctctgtgactcaagccgaagagcaatagctattttttaaagttagcattgtgttcaggcacatagtaaacattcctcaatggtgagaattttaatattcttttcttttcttttttttattttttgagatagagtctcactctgttgcccaggctggagtgcagtggtgtaatctcggctcaccataacctccgcctcccaggtccaagcctcagcctcccaagtagctgggattacaggtgcccaccaccatgcccagctcatttttatattttttagtaaagatgaaatttcaccatgttgtccaggccggtctcgaactcctggcctcaagtgatccacccaccttggcctcccaaagtgctgggattatagcatgagccactgcacccagccttaatgttcatttttcagcatgtaattaaggcaagattaatagaaaatggggtcccagattgcctcgccccaaccccatcttcttttggcttttggagtatgaaaagggggacgtgctgtggtctctgcctgaagctggctcgcccgggagccctgccggacccgtaaggaggagaacaaaccctggcaaatccgactggcccgaagtggatttgctagagtgacaggcagcaaaattaattcagtaaggcattcgtaagtgtatcacttcacaaaggagtcaaaactgcaggaatctgaacgaaaagatgccaagcaaaaggactgggagaagacctgcctactatgtacatttgactctgttttgtgccttaagagttacgtgagaggctgactctaacgtggttagaatggagaacccagggaggcttccttcaggacgaagagtgaggagggaaagctgccaggatgcaaggctgctctggcaacaggttcttctctcctgccccccagcccctgcgtctctttctctgttgtccagtcctctacaaattgtccagcccactgcagggagccagtctgatggattcaatagtttgccccattggagggagtcctcatgggccacctgtcagccaatggacctattctggtcaagtgtcctcccctgatctccagtgacttaggtggcacccagtctggcttgcctggccacctcccacctctggtggagggcaggcatcatgcatgtgtttggaaaatacatttgattttagagtttaattctggacagtggtcttgggactgtcttcaatagcaaggatcatgtgaccaagtccccatttcttttcacatttcagctgcctaatttactcctaaaatgtactctgtgtgctgggtggggaaattctgaactggcttctgattctggctctaacatcaggggaccagccttaagacttggagcaagctgccacttcctagggtcccagtttgctgccctgtggcacagcagggttaggagggaggagcacaagctaacctgccatcaccccgtggctgagttgggattttgaactgctgttgttatacataataacttctatggcttcgggcaccgagagagggaggccctaattcctttaccagaactggaacccttgtgtacataataacatttttaggaatctatgttcatagctggggacagagtggcagaatggtgaaatgttcccactggtgtcacacccatctcagcgagagtcagcctttgtcacagacctgctccgtgacctcgggaagatgatctgacctctcgacacctggttttcctcctctgggaagtggggatactaataggtcctcccccctggcttattggaggagtaagaggcaacacatgcaaagcagttaaccaggagcctgggtagggacctggctgtgagttcagagcctgggatttgtgggatggccagtgtatgcacttccagtgactgctggcattaccacaaacccttggtagattaagacaacagaaatctactctctcacagttctagaggccagaagtctaaactccttactgctcagttgtgcactggctgcgggctccaggggagaatctgttcctggtctcttccagcttctggtggccagccgcattccttggctcgtggctgcatcgctccagtcttcaaggtcagcatcttcaaatctctctctgctccatcttcacacggccttctcctcggtgtgtctgatatccctctgtctccctcttacagagatacctgcattggccagatgcagtggctcacacctgtaatcccagtgctttgggaggctgaggtgggaggatcacttggggccaggaattgaagattatgctgggcaacatagtaagaccccgtctctacaaaataaacagaaaagaactgtatttagggcccacccatgtaatccaggataatctccttccatgtcaagacccttacttaatcacatctgcaaagacccttgtattcacaggttctggggatcagggtgtggatatattttggggagggagacatttccagcctgtcacacccagctgcgggggacatgttcaagttggctgtcctttttgcctccactgcccgtttgctgtggagttgtgcccttgtctccttcaagctcccctagccgcccacacatcatctttcctgcccgagctcagctccccatcctgagacttcctatttctgcccacagccacatcattttctccaccatcctcctcagaactatctttgacccctggtgctcctaccctttcctgatgccactccacctacgccttacatcagtcaccaaatctcagcatcacagtctgaccaaaagggaaacttctcatctgactcctctgatgcacagagatggagctgagccctagagatagggagtgacttgctggggtcacatggtgatttcatggcgagactggaccacagcccaggcccctgggatccactcctaccctgactgcccatcggcaaaatgcttcctgaggacaaggctctctccatccttctgtcccttcctgagccctgcccttgcctcccctccttgggaggctgcggaagcctcgtgggccttctccagccagccactctggccactccagcattcctttcgctgctttcatttgggtcacccctgtggagatagcttcagtgtttcccagtgacctagaagcaaagtccatctgttggcaagcatttattgagcatctattattatgtgctaggggctggggagcccaagatgaaccaggcataggcccagccttcaatcagcctggcccatatgctgccttggcctggcattcacatttccacctgctcctcctgcctgctacaccgacccaccactgcctcaagcagcctacatccacagcgggatgcctgcactgctgcttccgcgtgtgctggcctgttggccctgtgtgtgtagtatcctggccccgtcaagagcttgtgctgtcttcagtgccctgaagtcagcccctctgcatgcacgcccttctgcagccctctggcctccgtggccaggtggcgagtcctgtttctgtcctgggttaactgaagccttggcagctgcccttgctgcctcatggggtgttttttggcctctatccctctctccctccactccaccctccctttttgctaccgcctgtctcttctggtttttgctattgcctggaaggtaggggacgtcacggtgctttgtgcagtagaggtagccctgattccatggcactgacacccccacctcaaacgcagccccccatgatgtttcctctctggggaagcacagccgtggctgaacagacacaggcgagcccctcagcccgggtgcctgtccccacacccacccaggatccagaaacctggggccctcacagggagttcctgctcagtccccaacaggaagtgttcctgcctgtgctagaactgggcatgtccttgctttcgaccctgagaaacctgtctggctggaaggcacagatgcctaacattttgagggacattttacttttcctgagagtttgagattttattacctatggctacataacagactacccaaaagcgaggtaccttaaaaacaaccaaaatgctatttgcccacaaatctgtgggtctggaatttaaacaggggatactgggtgctgttccctgtctggggagcatcacctttacctagacattggttgctttgcttaaacattcctgatcttttgcatacccaagaatgagttccatgttaacttgcatcttgcacacccaggaatgagttggagatgtggcttcaccacccccatgtcaggggtccgggctggtgtagctccggagtccggaggatggctgggtcagcttgaacatgtgcacgtgtttggctgagcttctcgttctcctccatatagtctcaggggcctctcactctccacgtggcctctctaacaggaaagtaaggcccgttacctggtggctcagggctcccaggactacaaatgtggaatccaccaagatatcctaaggcgtagccctagagctttgcagtcttcaaagcccagcatctgtccctgtcctgttttttttgttttgttttgttttgttttttgggatggagtctccctcttgtcgtccaggttggagtgcagtggcgtgatctcggctcactgcaacctccacctcccaggtttaagcagttctcctgcctcagcctcctgaatagctgggattacaggtgcccaccaccatacctggctaatatttgtatttttagtagagatgggagtttcaccatgttggccaggctggtctcgaactcctgaccccaggtgatccactcgcctcggcctcccacagtgctgggattacaggcatgagcttctgtgtccggcctcctgccctgttcttcatccagcaccctgaagtgagcccctccatgcgtgccccttggcacagctggcacagtgtcatctctgtcaccttctgttgtttcaggcagcccagattcagtggagtgatctatagagggcatgaataccaggaggtgcatttcactgggggctaccactgtaacagatgactacacatgtcctatctttccaggtggagtctaactcttcaagggatgcagggatgtgttctatcccacagcccctttcagaatggctcacacctaggagttgcttgatctatattcattttattaagaagggaacagggagatcacagatgccatgggggcatcttggagggcctctcatgctgcttaccccttcctcaccaagcacttcccctggcattggctggagggaaaggtagccatttgggctacgtttgataaatgagaaagctgagtctcagtgaagtttttagtttatacacttgccaaggaccaaatgataaattggcagattgaggttgaaagcctagttatgctcattttttattgaaaactagggaaataaatttacttttcagaaattcattttcaggtaaatttctctgaatgcatctaacctgtagggcaagacatatatgtattttttacattttaattttattatttttttattttaatttttaatttcttttttttttcccaagaccgggtctccctttgtcgtccaggctggagtgcagtggtgtgaccatggctcactgcagcctggacctcctgggctcaagtgatcctcctacctcagcctcccgagtagctggtactacaggaatgtgccaccacgctcggctaattttcttgtattttttttttagtagagagggttttctcccatatggtccaggttggtcttgaattcctgggcttacatgatccacctgcctcagcctctcaaagtactgggataacaggcgtgagccactgtgcccaggggcttgtgtttgaccagacatcactctctgtgagtcatccagcactagttaagttggaatgaacaaaactagccatgaaattgtggcttcttgtatcctaaaggtcaaaaaagaagtcctgcttcaacattactaagaggtaatataatttttttccatcaaatataaacttaaagagaatttttctgcaagtcttctcccattatatgccctcatgtgtgttaggcagtgcatggtgggaaacacataagtagtagtacgagttttccttgcatggggacatacttgctatttgtgtggtatgtgtctttttagcatacagaattacctttcttttcttcttgaaactgtggataggttacatgagcaatcatgaggtcaccaccacctccaccaatttggaaattagggaactaggatttcccttggagagagggtggtcaggttttacaaataaaaatacagggtgcttagttaaacagaatttcaaatgaacaacaaatcacttttaatgtaggtatatcccatgaaatttatgggacatgcttatactaaaaaatcactcattgttcatctgaaattctgatgtgactgagaatcctgtatttttttggcaattacaaaactaaaactgtagaaccaatgcatatggattagaagaaatataaagttctaatgtaaagaaatgtaaggttaccttaagagatcagaatgtgttctttagcaagacttgattacaactgaagtttgtaaaaaaaaaaaaaaaaaaaaaaggtatatttacaaaaacacttctaacctcttgtaaggtaccttaagaacgtgccaatcagaaagggggttagggctggacgtgatgtctcacgtctataatcccagtgctttgagaggccaaggttggaggatcactggagcccaggagtatgagagcagcctgggcaacataatgagaccccatctctacaaaaaaataaaaattttctgggtgtggtggcctgcatctctagtcccagctactcaggaggctaaagcaggaggattgcttgagtctgggagtctgaggctacaataaaccgtgatcacactgctgcactcgagcctgggtgacagaacaagaccctatctcaaaaaaaaaaaaaaaaagagattgatcaacaatagaaaatgaaaggtcaaaggaaaacctttgggctgggtgtggttttggatcatgcctataatcccagcactttgggaggacaagtgggtggttcgcttgaagtcaggagttcgagaccagcctggccaacatggcgaaaccccatctctactaaaaacacaaaaatcagctgggtgtggtgctgcatgcctgtaatcccagctacttgggaggctgaggcacgataaattgtttgaacctagggggtggaggtttcagtgagctgagattgcaccactgcactccagccagagcaagactctgtctcaaaaaaaagagagacaaactttgttcattctcctcaacaccatctggaagcatcaacttccaggctgagatggcttggatcttattgtggagatgcacttgccaagtgtcttagtcagcttgggctgctaccacagagtatcacaggttgggtggattacacaacaagcattcatcactcacagcagaggctaagaagtccaaagtcaagtgtcagcatggttgggttctggggagggctctcttcctggtccccagatggccagctacatgttgtgtcctcacatggctgggacaaagaggatgcaccaaactttgaggggtagggaccattagggtcatcaactaattacccatgtttaccaagaaagcttgttataaattggcttcctggctgggcgtggtggctcacgcctgtaatcccagcactttgggaggctgaggcaagtgaatcacctgaggtcaggaggtcgagaccagcctagccaacaaggagaaagcccgtctctactaaaaacgtaaaaattagctgggcgtggtcgtgggcatttgtaatcccagctactcgggaggctgaggcaggagaatcactcgaacctgggaggcggaggttgcagtgagccgataccgcaccactgcactctaacctgccgacaagagcgaaactatgtctcaaaaaaaaaaaaaaaaaaaagagagaaattgtcttcccctgcctcctgggagtgaaggtgctgatctatgaacctatgtccccagccctctgagggtgatgattcaatacaaagccattggggtttttctacatcattctctctatgagcttggatgttacaagggtggtccattcttttatttattttttatttttaatttatttttattatttttatttatttttttttgggacagggtcttgctctgttgcccaggctggagtgcagtggcatgatcttggcttactgcagcctcaacctcctgagcccaggcgatcctcccacctcagcctcctgagtagctaggaccacaggtgcacgccaccacacctgcttaagctgatccattcttgctgtgctgggtcacccccaggtgacactcaatgtcaataagtcgtgttttattccaacaactacgctttgtttttctggattgctactacagcaaatcgtagattccatttcttcagcatataaatgtgtaacaagaacaagtagcattcgggctcggtggctcacacctgtaatcccagcactttgtgaggctgaggcaggcagatcacctgaggtcaggagttcgagaccagcctgaccaacatggagaacccctgtttctacttaaaatacaaaattagctgggtgtggtggcacactttgggaggctgaggcgggtggatcactggagtccaggagctcaagaccagcctgggcaacatagcaagactccatctctaaaaaaaaaattaagattaaccaggtgtggtggcacatacctgtagtcccagctacatggaggctggggtgaaaggatcgcctgagcccaggaggtcaaggctgcagtgagtgcacagcctgggcaacggaatgtgaccttgtctcaaaaaaaaaaaaatcactgcattattttaataaaaacatgtatcttattggctgggtgcagtggctcatgcctgtaatcccagcactttgggaggccgaggtgggaggattgcttgagctcaggaattcaaggccagcctggttaatatagtgagacatctatactacaattcaaaacaacaataaaaaaattagctgggcatggtggcacacacctatagtcttagctactcagagggctgaggcggaaggaatgcttgagcccagaaggtcaaggctaaagtgagccctgatggtgccattgcacttcacagagtgaagagtgggtgacagagtgagaccctgtctcaaaaaaaagaaaaaaaaaaaaaagatagctaggagaccagcccggccaacaacatggtgaaaccctgtctctaggaaaatacaaaaattagccgggcattgcggcgggtgcctgtaatcccagctactccggaggctgaggcaggagaatcgcttgaaccgaggagagggaggttgtggtgagccgagattgtgccattgcactccagcctgggcaacaaaagcaaaactccaatcttaaaaaaaagaaaaaagataggtagatagatgtatctgcaaatgattcctaggagcagcccaggcctagagagtgaaaccactcatagtgactcacatcaacaggcccttttgtcagcgggcatttccgtaattagaacttgtgaccaacacatccaaccacgaggatatatcacaagtacttgtctccagcgctggtttcttagcaaaaaaacaacttgttaaatgtcagggctttgtgtttttgcctttgggcttttgccatgcctggttattgggcaccttctggtaataaacagttgaaaggagctgttcccatgtcttatttaattctctcattaagcctgtgggccagaggttcttattgttcatacccctggataaacacactgagtcccagggaggtaaagtgccttggctgagggccacccaggagctggtggtgcctcagctgaacccaagtccacagaccgtggagttcgcgccctctcactgtggcacacgggcctgagcctcaggaacactgcaaagtaggttggcttcccccttacggagcccctatccgggacagcctcaatccctcagggcccctctcggtgcctgcttggctgactgggcagcccagagagaacagtgacccagaaaagcaagaggagagtttccaggaggacagaacactggtgctatcaggtgccaggagcagcgtgtgccacgtgtgaccctgctctgctgtggctttttggtacgtgctgtgccctcagcctgggctgccgtggactggccgtccctacccctccaagacttagcccaaaatcttactttttttttttttcgagatagtttctcacttggtccaccaggctggaatgcagtggcacaatcttggctcactgcaacctccatctcccgggctcaagcgattctcctgcctcaggctcccaagtagctgggattataggtgcccgccagcatgcctggctaatttttgtatttttagtacagatggggttttgttacgttggccaggctggtctcgaactcctaacctcaggtgatccacccgcctcggcctcccaaagtgctgggattacaggaatgagccactgcatctggtttccaaaatattactcttttccccagaatggaaatacaattattattcaaaatataagagtaatcttaaaaaaatgttttaaaacgttttatatatacatgtaaaatttatatgcacattatatatatcaaatgtgtgaatatgtatttttgtgtttataaacacttaaactatgtaaatttatatataaaactataacatatgaacatgatattatactatgtatatgtttggtaaccctcattttcactcactacaaaataaatgtattttatatagtaagtatagatttacataattttttcaaggtaaatagttaaaaaaaataaagctagtaaatgctcattgcaaaataaatattgctaaaaaatatcaagaagaaagtaaaacagcacaaaaagccctccttctaacattattaacatttggcaaacatcctttttttttttttttttttttttgagacggattctcactttgttgcccaggctggagcgcactggggagatctcaactcactgcaacctctgtctcccaggctcaggtgattctcctgcctcagcctccccagtagctgggattacaggcacccaccaccacatcccagctaattttttttttatatatattttagtagagacgggtttcaccatgttggccaggctggtctccaactcctgacctcaaatgatccacccaccttggcctcccaaagtgttgggattacaggcgtgagccaccatgcccggcccaaacatccttttttacacacatatacacccatatttttatataaatagcttcaaattatatatacactgcttgggactttttaaaacatttcagcaagatcttggggacatccttccatgataatacgcatagcatgagattgttctttttaatgactacataatattttattgtgagagcataactttattgaacttatgtataaacactagtggtgagcatccatctttcagcttttcagaattaaaaacaacactgtgatgagccatccttatacatggattctttctggaataagaaataaatggactgaaaaattagaatgtacaattctagaggtcccacgttgtcaaattatgttgaaaaatgtgcaccacgaaaaagtctaaaagttcagccaagattcacatgggtcatttctgggcaaaaggaccaggcatggttttgttgttcttcctattcttctgtcctcctcagcttttctattctaagtgtgtccttcgttacgctgatgcaagttggcatttttacattgcacaagaatatatggttttaatccacgcaagtgtcatctctgacgacgctctcttttcagttcctcctgcaccacacttgctctcatcatctgctacaggggagggacctgctagccccgtgcctaagttagcaccagcaggaacccacaggtgttcagtggggagttgctgactgccttggagaagtgtatttgagacaagctgttaatggctcacggtcctagggtaaccccctcggctggcacctgcatttagcacagcagtgagccaagcagtttccagcttttgggaaaaaagccttgaggggtccctaagggcaagaaggcctttcctggctcagtccaatcagacacctgctgcggctgtgcttcttctggccacaggtccctgtctttgttggttccctgcactgacctggccaaaaggaagctgcttgcttctgggcagcggctgttccctcccccagaaagtctaaaaggacacagaggacgtcttcagtatttctgtataggtcacaagtgaagtgggtcgctgtcgctgttttacgtttggttggtgctgagacacttcctctttcatatttgtcttattcagaccatctcctccatcccccttggagtctgaaaaaggcgaaattgaaagaaaaactgaaaatttcaaaccgagctacagtgcaggagaccatgctgtcatcctgaagcagaggctggggacatcaccaagaggatcacagcatcctccagggttcaactgaggccactgacccagcctttttcttttattttctttctttcttcttctttttttaaatagaaatcagagtcttgctaggttgcccaggctgatctcaaactcctgagctcaaacaatcctcccacctcagccttctaaagtgctaggattacaggcttgagtcactatacccagcctgaccagggactttcttcctcccctcattcgaactttcttagctcccactcaagtcttcctaaatgctatgtggtattcttgggactcctaattcctaatttttcaggaagtgaaatgatattcttaaggtaaaaaccaaaatctgcttttgctcaattctttgactttactgtatttatatgccatatgtatatatatatagagagaaagagtgcatatagatatacacacacatatgtacacacacacacacacaatcagattgtggtagcttttggaaactctctgaggcacagaaaataagttgcctgacaagacatcaaagaattgcaaaagagaccacagccccaaaggccttactgactgctttgcgatttgtagcatgactgctgataagcatctatttgcttcagtaaatagagatgaagtagaatcataacatttgttccgggaaagagtaactaaagtgggaaatcataaacaacaaagcataaaaaaatcttaacctagtggactaaaagatttcttgcttttttcatttctgctaatggcctctctcccttggcactgccagaactggtccattaaaggtgaatcgagcctcagtttgcaggcaggacgtggtccaaaagatcatttgtaagttggttgtttggaccaaagaatgtgtttccccctagaaaccatttttctcagggtgactgggttctcagttttgcttgtacagtgccgttcaacttccactgaagctgagctctgggtctttgagggcaggttctctgcagtgcaggagggagaaaacaggtcacctgctgctgctttgcatagagccctggctctgagcacaatttaagcataaattgttttcttttctactttcccaactcccttttggcatccaggtccagggccctagtccctggattgcagcatcctttcctaatgtgctttacccacctctgggctgcttgcctgctgaggggggtctgtgaccccaaattacccacttactcctgcttcctgaccaatcagacttccatttcctcagggcagttgatatcagctaagggccaggggaaaagcaaaaggagcagatatgaattcacactagtaggtgaatcatggagaacctcttaaccctcttaatgtcttctcgtgttaaaacgaattggttgtgagacttgagagtccttgtggcagtatgggttagggatgaacacggtggctaaggattcagaattcacacacacattagtgggactcttaggctcttcactgcacctgcttccagaacactggcagtcagttaggaaacgatcctactctggaaaaaaatgggatggtcacagagaagaaactttcaggttcagacactgggagactcccctcagtgaataagctgattatctgccagatcgcctctgagaataagccacattcatgcacacagaaccccccaccagttttttgtgcatcataatgaaatcttaacagccaaagattaccagatgttgatggaaagttctaacatgaaacaaaaagaccaaacagaggaaacaacagaacaaatcttcaaaagtagtatagttactatctatagagaaatacgaaaagacattttatccatgaaatgagagggtgtattttagactgtttgggatgctataagaaaatatgataaactggatggtttacaaacaacagaaatttatttcccacggttctaggaactggaatccaagatcaaggtgctgatctggtgtctggggagggcctgctttctggttcagagatagtgtcttcttgcagtggcctcacatggcagaaggggtgagctgactcccttgggtctctttcataaaggcactaatactattcataagagttccactctcatgacctgatcacctctcaaaagttcccatctacaaatactatcacattgggggtaaggtctcaacatataaattttgtggggacacagacattcaaaccatagcagggtgcaaaataaaataatcataacaagaaagggattttggctatgaaaaagcagaatagttgaaagtaagtattcaaaagaaaagatagaaaataattgatgaccatagtacaaaaagatggaaaaatgtgagagagaggaaaatctgaggattcattctgaaagtccaacatccagcaagaatggagggcaggaaattatcaaagaaataataccagaaaatttctcagaatgaaaggataagagtctcagtatcgaagcgcctgctaagtgagccacaaaatgaatgggaagaaaggttcaggctaaggcacatctttataacccttcagaactctaaggataaaaaggagatactaaaatcttcctaaaaataacagataacatacaaaggactaggaatcaaaatggcattgaacatctcagtagcaacattggaagtcagaagaaactggagcaaactgtttataatactgaggggaaatgatttgcaatctagaattccacaccaacccagataaattctcaatcaagtatgagggcagaataaaaacattttcagatgtcaaagatctcacaatatttatctctatgtacctttattccagaaggttctggggatgtgctgctgaaaccaaacgagtcagccaggaaagaggaagacacagaatttaataatttaagaaacaggggatccaacagagcaaagtgtagttgtagtcctaggaacagctatgcagtaggcccatggacaaccagtatagatatgaatggggagatgaagttacccagaaaaaaaatgtaaccagtgtgcatgggccatgtagagaagcattaaaaaacaaagaatcagagaatcataaaaaatgaggcacatgcatattatataattttttaagaaaataaataatagaaatcaagtgatgattaactctaggcaaaaataaagaggttctacaagaacgaaagcatggtcatgtacactacttggctctgtagtgcacaatgtttgcataattatcataatgtaaacactgaccaccagattcaaccaaaatttatgatagaatcacaagaggaatgataggtggaaagtatgatgtatgagagttaagtcctcatttctcatggcagtaaactaacagatgctacctaaaattaaaagatcaagaaatctcattatacacacattgttgagaaacatggagataaataccagaaaaaacagctaaagagttgagaacagtagcctctaggaagatggcctatggggtggggactattacttttcattacaatgcttttagtacttcttagcttttaaaaatgtgtacttggaatattttcatacatatagtaattttattattattattactattattattattattgagatggagtcttgctctgtcacccaggctgaagtgcagtggcatgatctcagaacctgcaacctctgcgtcccaggttcaagcgattctcctgcctcagcctccaagtagctgggattacaggtgtgcaccaccacacctggctaattttcttttttctttttcttttttttttttttgtagcagagacgagggttcgccatgttggccaggctggtctcaaactcctgacctaagtgatccgcctgcctcaggctcccaaagtgctgggattacaggcgtgagccattgcacccggtccatatagtaattttaaaataaagtcaacaaattaggaagacaaaggatggcttggttgttaatctaaatgaatctctagttagtggtatgttggtgtaagtaaaattcagagaccatagaaaaatagattgaggagcagctgaaagggtaggcggaaagacagaggcagggaaccacctagaaagcatggagaagctgttatgcctcagggtcatttgtatatttaggaatgcctaaatattaatacattactgacttgttaaattgttttctgactgtaaaagtaataatacttattgtagaaagtttggaaaatgcaaattaataactaaagagggacagagaaaaatcaaaaccaccaaatatctcattattcatagattattatttatcagcactttttttttgacacagagcgagggcagtggcgcgatctcggctcactgcaacctccacctcccaggttcaagtgattctcatgcctcagcctcccgagtagctgggattacaggcgtgtgctaccatgcccagctaatttctgtattttttagtagagatggggtttcaccttgttggccaggcaggactcaaacccctgacctcagatgatctgcctgcctcagcttcccaaagttctgggattacaggcatgagccaccgtgcccaaccaagcacatatttttaaaacaaaaataagattacaatgtataggccaggcagggtggctcatgcctataatcccagcactttggaaggtggaggcatgcagatgtcttgagcccaggagttcaaaaccaaaacaagcctgggcaacatggtgaaaccccctctctacaaaaaaacacaaaacattagccaggtgtgatggtgcatacctgtaatccaagctacctgggagactgaggtgggaggatcacctgatcccaagaggtccaggctgcagtgagccgtgatcacactactgtactccagcctgggtgaaagagtgaggctctgtctcaaaaaaaaaaaaaaaaaaattacaatgtgtaaacatttctgtgtcacactttatttccccttagcatttctgtaggtcactattgtctttgagaaatgattttttttttttgagacaatcttgctctgtcacccaggctggagtgtagtggtgggaccacagctcactgcaacctccgtctcccgggttcaagcaattctcctgcctcagcctcctaagtagctggaactacaagcatgtgccaccatgcctggctaattgttgtatttttagtagagatgaggtttcaccatgttggccaggctggtctcaaactcctgacctcaggtaatcagcctgccttggcctcccaaagtgctgggattacaggcatgagccactgtgcccagctgagaaatgattttaaatagatgcttagtattctaacatatgaacatacatgtaatttatggtctatgattaataatttatgcttttccagtctccaatagctggatactttgattgtttctaattttcataattataaataatattttggtgactatccttaaccataagtctgtgagatctcttattgggtcaataggtatgaacattttaaaagctattaatactccatgtcaggttgttcaccagaaagattcgacctgtttatacaccgttctgccaggacaatctaccatcattggacattatcatcaaagacaactttttagtaaccatgttaatatatcacacattcaaaaaaagatcaaggttggggggaaattcgtaaaatggaatgcaaacaaaaataaatgaacctaactatatttcatgttaataacaatactacagtgaagggcagaattgggagggggaagaactaacccaggtaggtaactgggttttaatatatatcttctggctataaagaaccttaaataaatactaattggtagaattgttttcctgcagtgctatggattaggaattctgaaattatttttagtacatattctagtacagagcaaataaataaattgtgaataacaggagccaggtttctctctactggcaaaggacatcatacatatggaaaaatggaaggctagaatgaatgaactctgtggtgtcaggctggactggtattgaaaatgtcagtatggactcatgttttagttgtactgtggctacttatgaactgtgcttgatttttgggaatatactctgagatattttggagtgcagggcatcatgtctacaatttacttttttttggagacagtcttgctctgttgcccaggctggagtgcagtgatgtcatctcagctcactgcaacctccgcctcctgggttcaagcaattctcctgcctcagcctcccaagtagctgggattacaggcatgcaacaccatgacccactaatttttgtatatttagtagagacggggtttcaccgttttggcctggctggtctcaaactcctgacctcaagtgatcaacccacctcagcctcccaaagtgctgggattacaggcatgagccacctcgcccagcctgtaatttactctcaaatggttcaggaaaacaatgtatattttcatatagagacagagataaagacacaaaaaggatgagaatgataaagaaatgaggtaaaatgttaagtactggggaatctgggtgaagagaatgcagggattctttatactacttttgccacttttcttttagctagaaattatttcaaaacaaacagcttggccaaattagcaggtaagaaaaaattattagtgttttttattttatttcattcatgtgttcagtaaagttgaacacatggatgttaatggaccattcgggttatatggttcatattttttgctcatttttatgtcatggtgtttatcttttctgtgctgatttgtaaaagctattttaaaacccttcatctgccatatatgttacatttctttcctgctttctgccaccttccaatttgttaccaactttcttctccaaccttgggccactggcatatacactcattttaaatatcagaacttgtagtgctctttgaaatgcagacagactatggttcattctgcaactgcatattagttaacaggcaaaaataccttagtaagagaaagtgtcttttccttctaatgtaaaaaaaaaaaaaaacctaacccccccgaagcactaaggtgtttatttgtttatttttttgaacagggtctcactctgttgcccaggctgaagtgctgtgaatcacagctgactgcagcctcgatctcctaggctcaacccatcctcccacctctgcctcccaagtagctgagactacaggcatgtgtcactacacctggctttttttttttcttttttctttttttttagagatggggtctccctatgttgaccaggctggtctggaagtcctaggctcaagtgattctcctttctcctgtctcagcctcccaaagtgctgggatcataggcatgagacaccatgcctggtcagttatttaagaaaataaatattagaccatgcagaaataatgctatcctaaaatttgtgagcaagtacaaagttcatgatttagaaatttaaacagtttaaacgcaaaatgaagttctttttaatgaataccaaaaaactgactgaaaatctagtgaataccttttatgcttcagacacctcgtatagagagtctttaccctcaagcatctcgcagttgagtaagggtgacatgtaagaaataggttacaatcattgtgacaaggacaactgcagtattattatgtacacacaaggcaatgaacaggcagaagtaaagttttgtcatgaggcaggatgaggctatagaagaggtgacaactaagctaaagaagccactcaggatgtcagaagacagctgttcagtcaaaaacaggcacagtatccaaaggaactcatttgatccctaaaattctgttaagatgtgctgtaggtggggcgcggtggctcacgcctgtaatccctgcactttgggaggccgaagtaggtggatcacctgaggtcaggagttcaagaccagcctggccaacatggtgaaaccccgtctctactaaaaatacaaaaattggctaacatgacgaaaccctgtctctactaaaaatacaaaaaaaaaaaaaaaaaaaaaaattagccgggcgtggtggtgtgtgcctgtagtcccagctactctgtagactgaggcacgagaatcgcttgaacccaggaagcataagttgcagtgagccgagatcgcaccactgcactccagtctggatgacagagcgagacttcgtgtcaagtaataataataaaaaaagatgtgctgtaattgtctccgttttacaaaagaggtcaagtagttgacacaggtcccacgctagtgagggttttgggattcaagcacagaccaccttcgcccctatgctacaccacctcaggctgtcgggagataggcgcccagtcaaaaggcacatggaagaaagcccacgacttctcaagcattgaagcaggagtggcgcatcggtattctcaacttcaaactttgagaacagtcatggtaggaatgcattttattcaagaatgggttcaggtgagggtggatatgggcactgggttcaaaggacaaatttggagaattcatgatccaggagagtgaacaaataaggaagggctaaagagatcctcgaagttgaaaggttcagagttaatgtcctctaaggagagccaacaaggggttacaaatgctgaagtcatcaagaaaatgtgcctgtctttccttgagactgggaaggagaattaggatgacgaaaatccagaggatggtaaaatagcttgacttcaaaataacaggccgggcgccgtggctcacgcctgtaattccagcactgtgggagaccggggtgcgggggggtggatcacctgagcgcaggagttcgagaccagcctgggtaacagggtgaaaacccgtattaaaaaaaaaaaagccgggcgcggtggcccacgcctgtaatcccagcactttgggaggccaaggcgggcggatcacttgaggtcaggagttcgagaccagcctggccaacatggtgaaaccccatctctactaaaaataacaaaaattagccggacgtgatagcgggcacctgtagttccagctactggggaggctgaggcgggaaaatcgcttgaacccaggaggcaaaggttgcactgagcccagactgtcccactgcactccagcctgggcaacagagcaagactccgtctccaaaaaaaaaaaaaaaaaaaaaaaagcaagaaaaagaaagagaatggcgaggcccagagagaccgaaagtcccaccagagggtacagagctagctcagccctaatgccggccccgcggtgcctttccgagctcacggcctcccctcagcatccgggtttcggcctcggagcgccagggacgccacgaggacgcgccccacacttgcgcttctgggttccagcccccgcggcccccaacaaataaagaagggaaagtgctgagggtgacggccccggggagcgctgcggctctacgtcaacctgcggcggccgccgactcatttggggccacgctggttgcattcgtcacgccggcgatgcctctcaaacccgcggcctgccgaggacgttcccacacgggagaccccagcgacgcgggcgcatctgtggctctcgagaaccgggccgcggagccgccgcgagcgcaagcgaggaatcggcgactgcgggggtggacagctggggcttgtagtcccctcgctaccctctattctggaagaggcgggtcgcggccgctgaactccagctctgcgcctgcccaggcggccgcacgctcaggggcgtggcatgggtgggtcgtgagttgggcggggcccacagggcgtgcgcgacgcagcggcgcggcgcgtggcgtaaggggcgtggcgccagtgggcgtggcgtggcgcagtgcgaagggacgcggtgcgcatgcgcgtgagggctgccgcgggtgggtggtatcgaggcctgtcgggtcagggcggttcgcgggtgctgtcagagctgggccggggcccctaggcagggtagccgggtcgtagaggcgggggccggtcgcggtcggtggagcgggatgaggatgtaggaggggcggacgtggcggaagccgcggggtccgcggggtcggtgcctctagggagccagggaggcctttcccgaggctcctggggaagaagaggcgaagcgagagtccctggggaacccccactccactcccagctggagactgggttgtgtctgcatggaccagagcccacagtgcgagttgctataggcaaccagccagggtggccagctccttcccgtttgcccgtgatgttctggttttgggaccaaagcatcctaggcctccagcccactgcagtgaccgaattctgcgccccctgcccatcttctcccgcagcttccctagattaggcttgggaggcaagaggaggcctcctgacctttcacactgcctttttaatattaagatgaagtcacactccacaactttcttccagccaggcccagacatgtccgtccttgtaagttaaaagcttccatgggagccttccttcctaatcaaggtaggtagactacaggaaggtacatcttgttttatattttgtcctgtagaagtcagatttcagcccagttgtgtaggagtgaggatgagcctatgcttatatcagagctttgagtacagagacatttggtctggaattttagtcagcctcttcaaccccagaatttataggttcaatcagaacagacattagcttaagttttcccatcaatcgtctatcattaaactggcaaaatctaaataattagaaaatatgacaaagatgatccagacagagatgttcaactttttccttaattcaaaaagcctcgtggtggaacatcggacccattcaagaggaaggatgaaagctctatataggaacacgatgtgaatggaagaaacctgtcattgtgaggctggcttttgattagtcatctgatgtcttccctaatgtgacatgactttgaggccataaacttcagtggctaagctgtagtttctcagcctgcagttaaattgcagaaatgatagggcttacattagttttgtttttatttgatgttgaagatctttgagtcacattagaaacgatgagtatttttcatgtggcactgatgagttaattcatattattattttttgagacagagtctctattgcccaggctggactgcagtggcacgatcacggcccactgcagcctcgacctcctgggctcagatgatcctcccatcttagcctgccaagtagctgggactacaagtgcacatcaccacatccggctaatttttttgtagatatggggttttgccatgatgtcgaagctgatttcagactcctaggctcaagtaatccttctgccttggcctcccaaagtgctgggattataagcgtgagccactgtgccaggccaatattattccccaaaagaaggaagttgggtgtgaggtcctgctcctgtggtcaccgtgaggttttttttttttgttttggactcttgcccaggctggagtgcagtggcacagtcatggctcactgcagcctcaagctcctgggctcaagtgattctcctgtctcagcctccctggtagctaggaccacagatgtgcacaactatgcccagggaatttttaaattttttgtagagacagggtctcaccatgttgcctgagctgttctcaaactcctggcctcaagcaatcctcctatcccaaagtgctgaaattacaggcatgagccaccacacctggccaccactagtttttgtaatgggagcaggttccatatgagatggaggaatggatttcatgattgtctttttaatttcttagatctccaagaaattggacatgaggaaaccactctaagtgtgaccactctaaagcattagcaatcagtcatttcactctagggagaaatcagagctgaaatatagaggataggtaaagtccccaatgtagatatgtatttttatatttgattacttgcttttttttgttagatgcaaataatacggcactccgaacagacactaaaaacagctctcatctcaaagaacccagtgcttgtatcacagtatgagaaattaaatgctggggaacaacgtttaatgaatgaagccttccagccagccagtgatctctttggacccattaccttgcattctccatcagattggatcacctcccaccctgaggctccccaagactttgaacagttcttcagtgatccttacagaaagacaccctctccaaacaaacgcagcatttatatacagtccattggtaaatactggtaatgtgctggttttggttcagttttgcagtggcgctcttgtcaggaatagtccaggctatgggtctgattcagatgggccgttttaggatcgtttttgatattcattgcggcggtacaagttttgtagccaaactgacttaaaagataacattttgtttctttttgtttcatagcaacaccaatgaatgataaaggttattgaaaatttagagttggttttgtttctaatttgaatcttcttactcatagactgggtaaacactgaataatcatcttaaagtctgtttttaaatgttcttccatattgtaggctctctaggaaacaccagaattatcagtgaagaatatattaaatggctcacgggctactgtaaagcatatttctatggcttgagagtaaaactcctagaaccagttcctgtttctgtaacaagatgttcctttagagtcaatgagaacacacacaacctacaaattcatgcaggtgaattacacgactttgcaattcgaactgagtatatgtatataatatacactcatacatttatgtatttctttttaaataggggacatcctgaagttcttgaaaaagaagaaacctgaagatgccttctgtgttgtgggaataacaatgattgatctttacccaagagactcgtggaattttgtctttggacaggcctctttgacagatggtattccgtttttggcattgttgttagaagcttcttcagcttgagaatatttgaagatgttagaagagggaaaaaattccaaccaagaatcatattgatatttaaaatattttcagttgagacattatgccataatgggaagtgtgctgttggtagattgtgataatctaggttctggttggccactcactacctacaggaccttaaaggtaacaatacccacatcatggagtcatttggagataatttacataaaagtgcctgtacataaaaagtgtggataagcctggacaacatagaccacatgtctacaaaaaaataaaaatttaaaaaactaaattagctgggcatggtggcacatacctgtagtcctagctacgcaggaggctgaggtgagaggattgcttgagcccaggaggttgaggctgcagtgagccatgatcgagccactgcactccagcctgggcaataaagtgagaccgtgtctcaaaaaaaaaatgtatatataggcctggcatatatataggcatacagcataacagctagtaaatgtcagtaattcagtagcaaggtgaattaaaccaattacagtttgagctatcaatggatgtgaaaatcttgctaattatttttcaattcttttcatagtcatcttgcacagttagaatagccatagactaagtgtatgcttctttctcatcatacgacatttgttttttaatttaaagagtcaaaacgtccatctttgatttgagatatgtaataaaccttgactcattaggaactctgtatggtaatattagggatgggaaaggttctgcaaaccggtcatatttttaacctttttttttttttgtcatctctctacttctcccctccccttaattattgttcttatttctctaacttcatccctaagaatccaacacagacttgaaagggaaaaggccccctaaggggagtggttcattagtgttctggggatggggagtaagtacagggactatcctgagagtttatggtctgtctggatgttacattagccttaggatttgtgtggggtggtaagctttttgggacaaatgtttctactagaggtgggggctgtagggttatagagcctcttcccacttactcctttattctttattctccatttatgtgaggtttcttgtggcccccatggccctaccagcatgcactcttggagacgtgggtcactactttcttactgattttggtggtgtgaggtagctttttatcataagttttctcttttattattaacctgatagagatggaaacattgaaaaataattctatctaccttttatttttcttttgagacagagtctccctctgtcacccaggctggagtgcagtggtgtgatcatggctcactgcaacctcaacctcctgggctaaagggatcatcctgcctcagcctcccgagtagctgggaccacaggaccaccacacccggctattttattttattttatttttggccagatgggattttttttggccagatgggatctccctgtgttggtcaagctcatcttgaagtcctgggctcaagcgagcctcccatctcagcctcccaaagtgctttgattacaggtgtgagtcaccacacccagctaaaaaaataattttaaaaccatatgttcgtttatctagatattgctagctaacttatcttatgtgtttgaggaggtcaggaaacatttccccaaactgtatttactttaattctttttttggtaagtttcttaaatattacatgacataaaagatttacataggaaagtagcaggattagacagtgacaatatcttaacacagtggtcttgttttctccgagtttacaaagattgatatttttaaagtgagacgcattgactacgaaaaaaatagtctatttgtaggattattggaagaaggaaatgtccttgctgaaagtagtgaaatatgctcacacttgattggccagagggggttacttgtgataaaggaatagatttagtgtgctcttaatttccagaatgctatctttgcttaattttcaaatatcagtctacattttctgggtaaagggaggtgaggaagtttgtttttgaatcaaattagattggacaaatctactatgggtttattactttaaaaactgaacgagagacataaataaaagtgatcatgtaaacaagtcgaattatgaagcagtaccctgtagggtgagttatgtagcaaaccgtgttctctgtgcttgcagagatggttgatataactctaaatgtaacacaggaagtcagttacaagggtatttattctggtcaccagacactagtgacagaatagagttgagctgttctttgaaaagggggtagggttggggaaggggacgaggttattctgtcaaaagccgtggtttaaagcatgggcttcaagacatcaggggcagttgtcctcagtcagtgctgcgtgagggaaggccagcaacccctccagacacacgtgtaacagatctgtttagtgtgtccttaaatagtgaaatcatgacttcctattgttcatgtgatttttttttttttgagactgagtatcactctatcgtcaggctggagtgcaatggtgcgatcttggctcactgcaactccgcctcatgggttcaagccattctcccgcctcagcctccctagtagctgggattacaggcacctaccatcatgcctggctaattttttttagagacagggtttcaccatgttagccaggctggtcttgagcttctgacatcaggtgatccacctgcctcggcctcccaaagtcctaggattacaatcgtgagccaccacgcccaacccatgtggttattttttatgattcctttttgagtacttgatttggagtacttgctactttcagaaaaagacttcttttgtgggaaaagactctctgaaacttcagtttctcaagcatttgacctcaagtccattaagttttacaaggcaaggcaaagtggatagcagcaaaagattttgatagggaaatctggggcaaaagtcttcctttttggtggcaaaccataagtgtatcagatggtgtggacacagtgacacagagatgcactcactggccagatgggccagcagtctcttctttctttggtctttcttcagggaccttactctcattctgtcactgtttgtcctttttttgtaggtgtggggatattcagctttgccaggtatggcagtgatttttatagcatgcactataaaggcaaagtgaagaagctcaagaaaacatcttcaagtgactattcaattttcgacaactattatattccagaaataactagtgttttactacttcgatcctgtaaggtaagttattacaaaaatctgacaggacagttctttaaaagagatcttagttccgtaaactgtatattgtcagtccgtaaggtaatattataaatgagtttgtatcatttgtataattttggtgcatagtgcttgactgaaatgatcagtaaaacaatttaaatggataccttcatattgaaatttacaatatcagtgccagtttttctgtactactagttacagccttggctgtacccatgtgctattagtgtaattctgaattctggtatgagtgggtaacctactttttcaagctactgtggtcattgggcaaagctgctttccccaggcctttggagaacctctgctctggcctctctgggagcctgggccttcctgccctgggctccaggttaccctcgactgtagttgtcctggcagttcctgatatccccaactcggttttgtggaaagcctatctcccctttctccatagccagagagatgggcttttccttcagctagagaaattctgcttttacctgtactatttgttggggtttgacagctacacctctgagaactacattctcacagtgtgtttcatgggccccctgtgtcattgccacctgatgttctcattagcatgcagatcaagccccctttctcccagacctactgaaatcagcatctctaggggaagagccccagaatcagaattacaacaagtaccctagtgtagatcaagggttctcagccaggggtgattttgccatccagggaatattagcaacgtctggagacatttttgattttcacaatcagggagggagttctgttggcctctagtgggtagagccagggatgctgcaaagcatcgcacagtgcacaggacagcctcccacaacctggtattatcggtccaacatgtcagcgatgttgaggttgaggaagtctatagcaagaaaggcagtaagacatttggggaaatgagggattattaagtctttgaaggtctggacagggtgaagttttggtggtaatggtaagggagttgattcctatgtttcttggaaaagcaagaaaaagaagagacgtgtagcctaatgtgatggtggtcttataaagcctcaacatgattgtcttgcagactttaacccatgagatcggacacatatttggactgcgacactgccagtggcttgcatgcctcatgcaaggctccaaccacttggaagaagctgaccggcgccctctaaacctttgccctatctgtttgcacaagttgcagtgtgctgttggcttcagcattgtagaaagatacaaagtaagttggggggtggacagtctaaagagggggaagtggttatctgagtagcaaacccatgtttctattatatccttctctggagttataatttatcagaggaaattagtgtaaagataagcaggaagctgcggtttaaaaatgtgaagaaatgctcttcttaaaaacttcagcttgcctttgagtgatttatgcttacagttcaatgagaaatagtggaagaagtttctttgcttctcttccatttagggcaagagagcttgactttgcagaacagaataaatattgatatgtgtggcagagttcattttttaaaccctataagtgtgtggacaggatttacctttccaaatatgggacagaggtatgatgttcattaggaggaaaaaaatgattttctttaaaaaggaagaaggaaagtacctaatctcagtatgtgtgtgtgtgtgcccacacttgcccacaaacatcaatatacattcatgtgtctactcatgggtatgactgcattcaggtgactgcacagaaatgtctacacatgtgttttcacatacatatgtctacccatgcctgtgtggacacttatatatgtatatacgtacatgtcaaagtaatataatgccttgtggaatatttagcaagttgagaaaaaataacatcctattatgctagaaacaaagtgtaagaatgagtgtatttctttttcatcttttttcagtgcgtacttttgacatcatttgtaattctgtgtgtatttggtacgtgccatttcactcagtatatcattagcattatttcatattcacaccatcattatcaaatgcagcgtcttcatggggtaatatgtcaccctatgatctagaagccaatgcttctctcttgcctgatggtattttgctgtggtttgttgaagtgcgcatctttcatgtttttccaggcactggtgaggtggattgatgatgaatcttctgacacacctggagcaactccagaacacagtcacgaggataatgggaatttaccgaaacccgtggaagcctttaaggaatggaaagagtggataataaaatgcctggctgttctccaaaaatgaggaccttcaaataggagtgattgaaataaataactacttgcatgttatgctttcatttgggtggaatacttcattggaataaactactgatcttgtgctgtgtcaaagtaacagactagaaccttctttcaagtacctgaattgaaatgaaactcattttgaataataaaaactctagaaactctttatcttctcatcttactggcctggtctgtggcagcaagcacattatttccattccccaaatatgtttaggtctcccaagaaagctgggactggcggtaacgagcaagtaaataacttgaaaaagaaccgttcaatgccccaaggaaccaaccaacataatttccagggggtgattttgtttttagaagagccgctcccctcttttaggcccagccaagtcacatttttggacgtccgtgggctctgatcaccacagccctccttttccgagagcctaccttactgtctcaagtgcattaccttgtttttttctcttgctggttgtcaccttatccctgaaagaatgaacagcttgtatcagtttttagcagcttaaaatatgacctatcaggaatatttgcaagtgaaaataacaatggtccttacactaccacaacatttggtggtgggagttccgctgcaggtctcagctataacatagtcatttatgagggatcttacaaatagtgtgtaatggtatttatatttgtgagtgttgcactttttctatagatttagagcggctttcaggtttatttcagtaataatgtcctcctcacattacattgtgaagtgtttacctgagtcagggagagagtttaatggggttatctgtcggggtgccatgaatgctgatgatggtctgcagggtgtgaacatcagccccattgctacgggggtggacaggtggaaaagctcagacttgacaaaccacctctgctagatagatgtatcttggaaatccagaaattacagtgaatattttatggaatatcagtgagcagacagcatttcccactttcctatcttaccttgagggtaagacttaaaggtatatatgtatttgtaatttgaaacctggattcttcattgtttgatgtatgcagtatgatgtaacaaagtatagaaatgatccctgaaagtatagtctttgatgtatggagtatgatgtaaggcacatttcatatctgagtcagtggtttcccttggagtcattctacttgattgaacccatttaagtcattttagaaaatggtggtttgctattaaaattaattggagagaatacttggtcattctattaggaaaaagagactgatggagcatggtgttttatggattctgttacagggcttattcctccttgaataatgtatttaaaaaattattgtccattcgattacatttttttttattttcctacaaggcaagcacggttttagtcctgtaggtcagcctttgtcacaaactcttttgaactaagatttgcctagttgaataaataaggtccatttgtgtctacactgcactatgagactaggagaaaaatcatctaagaagtcattcactcttgctaaaaattgaactaaacataaattttatatgattcatttgttcagcaatcataagtgctgtgtataactatatatttttggataatttcttagggttcagcttaaaaatataatttgcttactgcaactaaattttatgtactatggttaaatctttgtggttttaaaagataattttcactaaataaatccacgcagattttgctctgcaaatgctggctgaacaaagtattgagctaataaagagaattaataattttctactatctaaatactcttaaaaatcagtgaatttggaatgtttttcatttatgtcatagatcctgatcctgggcacctgtggagttagtatctctccggtcaagagatttttcaggcctcagacttctaatggtgagggttaagtagaagaatttgtcgaggattacccgtcggttcttgtccagcttgctttttgaagcacacattcccctgatatgaataatttacatttcaagccctacgagggacagagggccgcgttgctccctcttgggagcagcagtgctaaaatcgaagcaggcagctgcgggaccgctatagccggccctgcgctcgggcccttcccgggcaggaaacgcgtcgctgtccccggctgcgcccaggccggcgggcccagcagctgcgaaccgccggcgcaccacctgtttccgcgcccggggacttccccggcggggctcagaagtgtgggatcggtcgcttggcttcccctggcgtcagcgacccagggtaacctcctccactgctgcgtgccgtgcaggcctgcctgtgtgagagccacgtgtgccgcgctctgggcacagccttggaaagtcaggaccgcgacggcagcagagcagtgagtggaattaattctcaagtagagcatttaaaaagtgcttcattgaagagtttgaatctcagtcactttgtagattctgatatctagagtggcaccgtccaacaaaaatataatacaagccacatatgtaagcttgatgtttctagtagtcgtattagcaaatgcataaagaagcaggtggagttaattttaatagtatattctgtttaatccaatgcatccaaaatattatttcaatcaatatcaatgctgaatgttttatgtcctttttttgtaccatcttcaaattcccgtgtgtttgttacacttgcagtacatcttacttccaactggccacattttcaagtgctcaacagccccatgtggcttgtgtctattgtattggacagtgcagctctagaccagtacccaactctagtgtacctggaaaaatgtacccgtggtattgagttactaggagaggaaggcttatttcaggaaaaggtcatgtaaatcttctgtcagtacagccggtgttgacattcaagctgaaagggtgtatgtagacaccgtttaatgtctacattaaaggcctctggcttcggtgttaacttgtttctttaaaagcttgatactgttctctgttgcagcttgttttttaccctcccgtcttcattttcaagggcctggtattgtcttcaaatgcatttccatttttggaaagcagagtcgtaaagcattaataatgtggagattatttagtccatttcatgcatgaggacacaagcctgcagcagccgagtaaacttgcttgttgtttaaccaatggcaaaaatgggatcagatcccaagtctccctaatgttgagttattcgttgttttcactgtgctgcatgacctcattgaagtaaaatatcaccaaccagaacctaaccatttttcccccgggttgtttacaagggattatacacgattaaactgtcaatttcttttctgttcaagtagagtcatctggggttgctcaaagttggagaaatcagtctatatacttctgccttagtaccaaaaaaagagaggtgcaatatttatttatttttgaaatagggtcttgctctgttgcccaggctggagtgcagtggcatgatcacggctcactggagcctccacctcccgtggtcaagtggtcctcccacctcagcctcccaagtagctggtattacaggtgtgcaccaccatgccccgtgtattttttttatttttattttttagagatggggttttttccacattgtccaggctggtctggattcctgagctcaagcaatctgcctgccttggcctcccaaagtgctgggattactgatgtgagccaccatggccggccaagagttgcaatatttagtaaagctcttccgactagttgaggcattaaaagaaagcattatggaaaaaaaaagtctactggaaaatagttgaaacaaaatctattgaggcagtatgttaaaacccacagacctccatacttaacccagtattgatttcatcccactgttttctttagtgtctgctcatggatcagttttttcttctttacaactgacccacccatatagtacactactgctgggcactctgagacccatccatcctcagatgctgagccggtgggttctcagcacagtgctttcagtgtcctatggttatccagctgtttcgtagcagcacagactctcttgaactgtaactgtcaatagataacattttttttctcttgtgtaactaaagggaaaaaagtctataactcattcattcattcatgtattttttcattcaacaatattcatggagcaccgcctactgggtgccaggccctgctcaaagccttgggaatacagcagtgaacaaagaactcctaccctaatacactagtggatgagacagagagtcaaggagtaaacagatgctttattttattttatttatttttttgagacagagtcttgtcctgtcacccaggctagagtgcagtggtgtgatcttggctcactatatcttctgcctcctgggctcaagtggtcctcccgcctcagcttcccacgtagctgggagtacaggcatgtgccaccatgcctggctaatttttgtagtttttgtagagaggggttttaccatgttgaccaggctagtctcaaactcccaggctcaagcaatctgcccaccttagcctcccaaagtggatgctgttataacctaataacagcaaagtaaatggatagaaacaagtaccattttgaataggatagacaggaatgcctccctagggaggtggcatttggaagtgatcaaattgaagggtcacactgcatacacatctcagggaagggagtaccaagcaaaggaaaccacaaatgctaaggcctgaagcttgcaacagtaagaacaattccagaaacagtaagagaggctgggcgtggtggctcacacctgtaatcccagcactttgggaggctgaagcaggtagatcacctaggtcaggagttcgagaccagcctggccaacatgacgaaaccccatctctactaaaaatacaaaaaaaaaatgagctgggtgtggtggcgggtgcctgtaatctcagctactcaggaggctcaggcaggagaattgcttgaacctggaggcggaggttgcagtgaggcgagattgtgccattgcactccagcgtgggtgacaagagcaaaactccatctcaaacgaaaacaaacaaaaaaaaaaaaaagaaagggccgggcgtagtggctcacgcctgaattcccagcactttgggaggctgaggtcggcggatcacgatgtcaggagatcgagaccatcctggctaacacggtgaaactccgtgtctactaaaaatacaaaaaattagccaggtgtggtggcgggcgcctgtagtcccagctactcgggaggctgaggcaggagaattgcttgagcctgggaggcggaggttgcagtgagccaagattgcaccactgcactccaacctgggcgacagagcgagactgcccccccaacccccccagaaaaagagccagtgaggctagtgtagcaggagcagagggaaaagtaatagtatccatcaggcagttcatgcagggcccattgctaaggatttagttcagacttgtgctgtaagaggattactgtggctgctgtatggaaaattaaggtgggggtggcgtgttccaagagtggaagcaggcaggccagctagaagactactgtaataatccagctaagatgatattggcttggatcaagggtcctggtgcagttggcagaagcagtcagctcctggatatatttagaaaggagagccgattggatgtgtggaggagtgggtttgaggaggatgatccagagttctgctgaggacactttaagtagaagatgcctagttttatatccatgccctgccatgcgggcagatataaatcaggagctcagggacaaagttgggactaagaatgggaggtgccagtgcagagagggtgcttaaagttttggttgaattctagggtgtataagttgttagggaagttagcgtgcttgttcttgagttgctggaaaggcatataaatgacacaaatacatggccacaatctgtattttctcaataatatttggtgaaatgttctgggcatcaggtttcccgtctaattttccatgtaggaaatggatagtcattgaagtagttttgatttgggtgagttgttacatggaaagggaagttgtaagttctcttgccacttttcttgttctgcacctttagagagtcattaacgagaactgaacactagggggacccagtttccttacttatgcaacggcggctggcccagctgtacgctacgatcgccctcacttaggacacatgcaatataaacacaaatctgaaaacaagggcagcttctcttttatcaatgcaatgtatacttatagcagtgatcatttttgcgtgtaacatgtctgaattccttaaataggtcattttaagtaatgtgcataaccattactatttttcttttatgagacagggtctcactctttgccaaggctgtgtgcagtgatgccatctggactcactgcaacctctgccttctgggctcaagtgctctttctacctcagcctcctgagtagctgggaccacaggcatgagccaccacacctggctaattttggtttcgccatgtggcccaggctggtcttgaactcctgggctcaagcaattcactcaccgtggcttcctgaagtgctgggattacagggatgagccacaacacctggccacggtttaaagaattaaagacaatggcttctaaactctagttccctattggtgagccccatatttgcaaacttgtgaaactaaggatcatgatttcttttttattttttcttaatttttattttttgagatggaatcttgctctgtcgcccaggctagggtgcagtggcgtgatctcgactcactgcaacctccacctcccaggttcaagtgcttctcctgcctcagccccccgagtagctgggattacaggcacgcaccaacatgtccggctaatttttgtatttttagtagagacaggatttcaccatgttggctaggctggtctcgaactcctgacctcaagtgagccacccgcctcggcttctcaaagtgctgggtgggattacaggtgtgcgccaccacgcccagctgaaggatcatgatgatttctgatttacaatagttgaattggagtatggaaatctaaatgtaataaataccacctggtgatttgaatctgcgccacaagaatgctgacatagaatccattttctgttttatcaccagatattaagcaaagggaaaggcaaataaatgctgaaaagctacattacatattattggagtataaaatgtataactttgttaaaaggtttggacacattttgtattagttacggatacataggtcttaaaagagtacatggtctcaactcttttttttttgagttggagtttcgctcttgttgcccaggctggggtacaatggcgcaatcttggctcaccacaacctccatctcctggattcaagtgattctcctgtcagcctcccgagtagctggaattataggcatgcagcaccatgcctgtctaattttgtatttttagtagagatggggtttttccatgttggtcaggctggtctcgaactcccaacctcaggtgatccacccgccttggcctcccaaagagctgggattacaggcgtgagccactgcacctggcccaactcatttttataagtagaataattttacttttgggtagagaaagtctacataaggtttatactgaaacctcttgaagtcaacaagcttaaagcagaatctttttaatcaggggaaatgaaaacataattagcggcctggtgtggtggctcacgcctgtaatcccaacactttgggaggccgaggtgggtggatcacctgagatcaggagtttgagaccagcctggccaagatggcgaaaccctgtctctactaaaaatacaaaaattagctgggcgtggtggcacatgcctgtaatcccagctactttggaggctgaggaaggagaatcacttgaacccaggaggtggaggttgcagtgagcggagatcacgccactgcactccagcctgggcaacaagggtgaaactccatctcagaaaaaaaaaaaaaaaagaaaaaagaaaacgtaattaacaaatgtgttagctataatgtcgggcacggtgactcatgcctgtaatcccagcactttggaaggccatagtgggcagatcacttgaggtcaggagttcgagaccagcctggccaacatggcaaaatcctgtctccactaaaaatacaaaaactagctgggtgtggtggtgcacgcctgtaatcccagctacttgggaggctgacgcaggagaattgcttgaactctggaggtggaggttgcagtgagccaaggttgtgccactgcactccagtctgggcgacagagcaagactctgtctcaaaacaacaacaacaatgaaaaagtgttagctgcttgatctttcctattttggggcagttatgatctaagaattactttgaccacaatgaatcctttcccatgggtcaggatgttagttctcagagctttgcttctggcggtactgacctgtgccggtgttacagatgtgtggtgaaggggctggaaactgtggtccacaggccaaatccagtccactgttttttttttttttcagcctgagagctaatagtgtgtgttgtttttttttttttaacatttttatgtgattgaaaaaaaatatatttcctgtgtgaaaatcttgtgaaattcacatttcagtatccgtaaataaaattccattgaaacatggccacgttcattcatttatatattgtctgtggctgcttttgaccctcaatggcagagttgactagacagaggcctcatggcctgcaaagctttaaatatttactatctggacctttacagaaaaagtttgccaacccctggcatgtagagtctgtgctgtttacttacaggttgcaacagttcttggaatgactctgtaactggttgtggtctttaactatttgcctttatgacttttgataggcttactctggctaccatgatatcatttcattcatgtatttttgattaataattaaattccattgatgctttcattcttatttcaattcttagatgaaaatatgcttcttcatttgattatattgtttaatttttatttccctcttctgttattcattacttaatacttcccttgaattatttagtctttttctaaggtgctttaaaatagttcgtatgaaactcaacataaaataaaatcgtcctgttttcaatgatcaaagtatatatatgtatatatatgtatatatatacttttttgtataaaaagtatatatatgtatatatatacttttttttgtataaaaagtatatatatgtatatatatactttttttttgtataaaaagtatacaaaaaaaaaaagacataaaaaagtttaggctgcacatgatggctcacacctgtaatcccagcactttgagaggccgaagcaggtggatcacctgaggtcaggagtttgaagccaacctggccaacatggtgaaacccaatctctagtaaaaatacacaaaattagccaggcatggtggcgggcacctgtaatcctagctacatgggagggtgagacaggagaatcacttgaacctgggaggcggaggttgcagtgagctgagattgtgccattgcactccagcctgggcaacaagagcgaaactccatctcaaaaaataataataataaatataagtaaataaaaagttcagtagaaacttcttgggaaactttatgtgtctctagtagagttaaaaggttttgcagaagataaacgttaaaaaattatttatttggagtgaatctttggtgagtttttataactttaattgcctcaaacactgaatgctgtgagagtcaataaaaaatcttagaagagaatcggtctctttaaataaaaaatccataaatttattgcaaatctagaagtaccagaatgtcactaatacagaacagatcagcaatcttgtttgtattttcttccaaacatttaaaaccttgattattgacatactgaaattggcatacattttgttttcatgcagataacagaatagacatggagcagatccctcagaaatcagttataaatattaaattgtattgaacattcatagtaaaaaatatgtcgtaaagtgctgaagtcatgtaagtctgcaaaactgccacaagctcaaagttctcaagcagtgacagagatttgctacatccaccttgttttagattatgcctgtttttgacagacactttgtcatttcctcccccaccctccccaaagttttatagattgtcctatttctatggctgataagatgctctacaaaatgtagcaggtggtgatgaactatgccactttcatttcagtgcagagaaatattcaagcttgtgtgtacctgtaaccaaactaggcttgttatgtttttccccctgagttgtcataaattaacattaacgatgaataaagatggagcagcaagcattgaccatcacctgcagggtgagattgtggtaaaataggtgagtaaaaagtccacctattatcctgacacttgccctccttacagaaaactgctaacgtgagcaatactatacatgtagtgtgactccaaaaaaaaaggaagaataaaacaaacaaaacaaaacaatgaccagttacccgatacctctggcaacttagaccaatcaagtcatgtgttatagaagatgtaaattgcaacttgtaactcgctataacataattgtctctgttacccccatgtgaaatacagaaatgcttcaataattagatggttttttctttaaatcagaaatgctttaacaattctctgaaatataattctgatcaaagaagttcctcaagtattcttaaatgataaaacaaattagttttgaaagctaaggcgatttgcaatccattattttttcccctttaatagcacacgttgcccctaatcaaatggaagaatcatgacaacttggccttttatgaaagtatttttacaagataagacgtattctgtgaggcatttaaaggattgcagaaaggaggtaaaaatgctgcttatgtctcagattttatttcttttgattactttaatcatcctagaataacttaataataaatagcggtttaaattaaagacactacagtcacatatttctgtataactaaaagcaacaggaaacacatttttaaatgccattttgtatattctgtactgaaacacttctgataaggactggccataaaaagaagtggtaatcttcacatttatgaagttcaagttatatatatatatatatacttaaaatttgtttattagtaaaatgtttggtcttaaactatatttcatttccagcaagcagaggccgtaatttgttaacgggaaccttggtattttacaaagggtttaacaaaaactatttattcatatttctgaaaattaggaattttaaaaatgattgaagtctttttttttttgactggccaatttcatttcaatgacctgggttggatgttgttttattcaggagagtagtttattcagacaagaccataggaagaaagaaaagaaaaaaagaaaatcatttatcccacgtgaaagcttttaaaaccactttgccagttcatgtcactattttaatatcggaatgtgaaccaaagagtctttctacatatctcttgtattgctactgaatacagccagatttatatatggaagagtgcttggttgttttttgttttggctttaaaaacaagcaaaaaaaaaaagcttaaaacaaaacaaaacaaaacaaaagcgatgttggtagtgctcttcacatacacattccctttaaaatgtagttttgaaagtggagtagaggggttagctcctctgcctccttgtgtccccgttgggcccaccccatccctctccagccaacacagtggctgttgttgtaagaaagtgtgtcataccggctccatttgcacgtgaactctgtgctcattttttgcaagatccatttccagaaagtcttcaggtatgtcctgtaaagtcttcccacgatggctcactacctttgtttcacctgagtgatgatgctggcacagtcccatcttacacggtctcaccagggcgaggcacacagcagccagggccatgccagctgcgcaggagtagaaggccctgctgtagatcttactttggtccaccaacaaacctggaagagagcatggcgtccgttaacagcatccttcctagacataagcccctcacccaggcgaccatcccattcagaagcctctcagtttcactgccttccttgttttcttttgtgtttctaaagaaaaatgggtgttaagggcagaaatctttactagactggagaggagaaagagacaaacacccaatatacttgttcttcttgggctaagcctgtcctagcagaggacctaaaacctgggacatttcgatgcatacttctttgaaaaggtaatattcttcggtaggaaggaactgtattattttcacttgagttcactttaggttttttttttttttttttagacagagttttattcttgttgccccaggtggagtgcgatggtgcaatctcaggtcactgcaacctctgcctcccaggttcaagcgattctcctgcctcagcctcccgaatagctgggattagaggtgtctgccaccatgcccagctacttttgtatttttagtagagatggggttttgccatgttggccaggctggtctggaactcctgacctcaaatgatccgcccgcctcatcctcccaaagtgttgggattagaggcatgagccactgcgcccggcccgttttaggtatcttttgacagggggtacgatttctaatcacaaacactttaaagacccatttgggatctaagatatgaaacatacctatgtccctcctacaaggaaatattctgtacaaatcagttaggtatttacagagtgctgctatccattcccaaatacctttcctaagaaaggaagatgacttacagaagtccattagttctatcattccaaaagtcaggtgggctctgaaggtgataaatccatgagttcttgcctagcatgagagaaggcaaggtgacagaaaaagcctgggttggcgggtgcggtggctcacacctgtaatcctagtactttgggaggccaaggcaggcggatcacgaggtcaagagattgagaccatcctggccaacatggtgaaaccccatctctactaaaaatacaaaaattagccaggcgtggtggtgggtgcctgtagtcccagctactcaggaggctgaggcaggagaatcacttgaatctgggaggtggaggttgcagtgagctgagactgcgccactgcactccagcctgggtgatagagcgagactccatctcaaaaaaaaaaaaaaaaggccagggtcaatctggactacagacacagcttccagtcctgaatcgaccactaatttaccatctgacctttagcttcaattctttggccttcagtttcctcatatttaaatcaagagggctggctcaggtaatctctaatccctggcagctctaaaattcaatggaaatataaaacggcagtaagttttttttatggcttgaacaggaagctagcacaattcacaagggaaagtagacaagtgtttgtattttgtgtatttaaattacctgcaaggggcggtccagccagtcctgctatgctctgaatgaagatgtagaccccagctgcagaagacatcttctcaatgcccacgacatcatcctcagcaagcagtggaatgtgagtccctcctattgttccaaccataaacccaaaaaatatgctgcatgacattagaccccagaattcagtagcaaaagtaaaggcaaacagagacacagtcaataagatgacgcagatgagctcaatgtaaatcttacgaatgggctccctgttgaggacaaaaccagctccgatccttccgaaaacttctgcaatggccatcgtagataataaaaaagcagcgcggtcctggtcaatgcccagactaatgcccagaggaatgatgtacaaggaaggtgcaaagaatcccagtgttgcaaagagaccaaataatgcataacaaataaaacttttctctttcaaaatggagaagtctaatagcggggctttcttttcgcttggcctggggctggtcttcaccaggacctgctgcatgtcggccttcggctccagttccaggttagtgtgagtaggcacatttttaggtgaggtagttagttctactcctgagtcaatggagtctattgaggttcgtgttttctcattttcaagcatatactgcgcttctttccgattttcctggatgactattttcggtgacgctggtcctctgataaagatgggtctgagcagtgctccgaagatgacaatgtttaactgtagtaggcccacgaagaggaggctgtatctccagccaatgcgctccttcagagccatgattgcttgaataggcaggagtgaagaagaaataatataaggtcaataatggactcaagacccaggagaagccatcaagaagaaatatggatccagattttgttataagttctgtggaaatttattatactcagcagtatgaatgtactcaatctttatttatttactttttgagacagagtctcactctgtcaccaggctggagtgcagtggcctgatctcagctcaccgcaacctccacctcccgggttcaagcgattctcctgcctcagcctcctgagtagctgggactataggcgtgcgccaccacgaccagccaatttttgtatttttagtagagacagggtttcactgtgttggccaggatggtctcgatctcctgacctcctgatctgcctgcctcggcctctcaaagtactgggattacaggcatgagccactgcacctggcctttttttgtgtgttttaagtagagacaggtttttgccatgttggccaggctggtctcgatcacctgacctcaggtgatccgcccacctcagcctcccaaagtgctgggattacaggtgtaagccaccgtgctcagttacagattttgttttgagatgatctacacacagataagaatgctgtgtttattagcataatctaaatccacattgaatgtagctcttttgaaaaacgagaggacataacaggtgaataattgcaaattactagattattctggaatgcatgtgtcaagaaagccctaccactgcatatgtgcccagttaggaattgaaacctattattaaggtggtctgaatacctaaagtgggggttagggaggacagatcctaaaaatgagctggagaagagacgtaaataacgtctcattacacatacactgaaagtcatccatactgttggcaaaagttagcgtagcaagaatacctgagtgacgtctctcatccacattcatacttaggctgttgtagtccacctacctggtgcgaaagcaaacacagcgaaacattctcctgtggaagcaactgcagtgactatggaacgtcttttgccaaaatattgtgataggatggttacagttgggagaaaactaaagcagtatcccagacctgtgaaagaaaagtcaaaaaagccaatgagacccacatactgcttgagactggaaggatgcattaaaagatctgggatttttggttttgctttttgaatcttaagttctaggagccaagtaattcattctggacaaaggtgatgttgcaaagaaaaatgggtttcattaacggtctggataaacttcagtggttgtttgggatactaaaaatataactttttttttttttatctttgcaacactttttttcaaatttatataattcacaatggatgaaactattattgcatgaaattttatataagatttgtatctagaaagaaataagtcatttcatatgtgcagaaatacaggaaaaatttaaagtctgcaaatcttaacaactgtgtgtgtatctatcatctatgaggaatatatggcctccttttattgttcatttcatttttttttttttaaacagacagggtctcactctgttgcccaggctggagtgcagtggtgtgatcacagctcactggagccttgacctcccaggctcaagtgatcctcccacctcagcctccaaagtgataggatggttacagctgggaccacaggcacgcaccaccacgcttggctagtttttattttttgtagagatggagtctccctatgttgccccagttggtctcaaactgctgggctcacgtgatcctcctgtctcagcctcccgaagtgctgggattacaggcatgagccaccatgctggctactccttttgaatggaaaaaggttttcttaggcccccaagaataagtctggcatgttgcacttcccctacagccctggatcctcagacactgatgtgagaaatactggctacagaaattcgtcttactttgtaaaaatgctatcttttggctgcaaatacagcaaaagagaaattatcatcatctttggtgaagatcaaacaaaaacccttgggcacttgagaacagattcccaggtcccctgaagtccatatagctcagttcaaaactactgatctgagacactgttaatgttaaagaaaaaaagaaagagaaagaaatatagtttggctttaatttcctccttccccttccttgttcttcaaactaagtgtctagacaacttctgagccaaagaggaacacttaccagagatgatgccgatggcgacgtacatatgagaaacctcttgtgagaaggaggcggccaccatcccggtgctgacaagtagcccccccaacatcactaccagacggtgtccgaaacgattgctcaggactgtggcgaggggagctgccgggaaagaacaaaacgatattttaactcacagaggcttcagggttagctgccataagactccttcctccacgtcttgcacatggagagatgatgtcgaatataaatatggccgagcgcagtggctcatgcctgtaatcccagcactttgggaggttgaggacggaggatcgcttgagcccaggagttcaagactagcccgggcaacatggtgaaaccccgtctctacaaaaaatacaaaaattagccaggcatggtggtgtgcacctgtagtcccagctacttggcaggcagagatgggaggattgtttgagcctgggaggcagacgatgcagtgagccaagattgcaccactgcactccatactgggtgacagagtgagaccctgtctcaagaaaaaacaaaaccaaaccataacacatttcatgcaaagtcagtgcaggaattattttactatttgttcaaattcaacacgatttgtcagactcctgaaagagaaagccagaataacagtataaaacttttatctatatttttagatgactctgactcaccatgagcacctataaaattagatatgtattgaatttatgttattctataataaaaattggttttcctatgattgcttgaattattttttctctactcactactttggattctttttaaaaagctccatttggggtcagattctagttagtttctttctttttttttttttgagatggagttttgctcttgttttctaggctggagtgcagtggtgtgatctcggctcactgcaacctccacctcctgggttcaactgattctcctgcctcagcctcccaagtagctgggattacaggcatgtgccaccatgcccggctgattgtgtatttttagtagagatggggtttctccatgttggtcaggctggtctcgaactactgacctcaggtgatccgcccacctcggcctcccaaagtgttgggattacaggcgtgagccaccgcgcccagcctagttagtttcttgacaggatgaaagaatgtgaattctaagttatgcactcctgaaggagagttgctatgggatagataattgaaagtgaatcatcatttgcttagcttctataagctgtatcccctaggacatttaaatctggcaaattagtttcctagttataggttacttaatattaacttgacaacagtgacgtaagtgagccattgagagttgggtcaaggaacaacaacatgctagaaaaggaagtgggaaaaaaaggattccatttttttgggttagtctatatgtatctactatgttaactattagaatacaaagtaatcttggatgtagctcataataaaaccactctcatcattttgagccaggatgttggctcaaagcattaacaactagaataatagcatttggaagaattatcttctggtataatagtattaagtggaaatttcttgttgactacatttttatttttagttataaaagacctaaaacttaagctttgggattttctttttatttagattaccaaatgtaacattttagtcctaattcatttgttatctttctaagaaggtaattaagcattccacaatttaaaaatgaagttatcttggctgggtgcggtggcttacacctgtaaatccagcactttgggaggccgaagcaggtggatcacgagttcaggagttagagactagcctggccaacatagcaaaaccccgtctctactataaaaatacaaaaaattagccaggcgtggtggcaggtgcctgtaatcccagctactcgggaggctaaggcaggagaatcacttgaacctgggaggcggaggttgcagtgagctgagaccgcaccactgcactccagcctaggcaacaaagcgagactccgtctcaaaaaaaaaaaaaattaagttatcttgatactcacttaaaatagaaccaggaatgacttcatgaaacttgtaagggatagtatgagaactaacaagataaatttctctctctctctttttttattttttgagacagagtcttgctctgtctcccaggctggagtgcagtggcacaatctcagctcactgcaacctctgcctcccaggatcaagtgattctcctgcctcagccttccgagtagctgggattacaggtgcccaccaccacacccggctaacgagaaatttctaccttacccaaagggtaaaaacatgtagaactgccttgtaaagacattctatggctaaaaatggactacatttaaagaagggctttaatttcagcaataacttcagagataacagttccatgacagtgtgtaagtgtaaacttagggaagtttaaggtcagcctggttaactttctttattttttttattttttgagatggggtcttgctctgttgcccaggctggaatgcaatggcatgatcatggctcactgcagccttgacctcccaggctcaagcaattctcgctctgcagcctcctgagtagctgggatcacaggtgtgtaccaccatgcccggccaattttttattttaattttttgtagagatggagtcttgctatgttgcccaggctagtctcaaactctagggctcaagcaatcctttcatcttggcctcccagagtgctgggattacaggcgtgagccaccatgcccagcttggttaactttctgaggtgagttcaacagcccttttctcttagaaaacccttggcaattatttctgacagaccaatgaactcatgagacctggcatgtatattcaatagccctttataggaccaagtgaagattagtatgttaaaaatgatactgaagccccattttattttatgcgattgggtctgggagtatattatgtaatgatgaatcagtgaagtcctttagggaaacaggtgcttggaattcagaaggtctcctcagaacaatatttgtaatttcaccttatctccttgtacacatctcattttgcttcatgcatccacatttacatgtttccacttggaattatgagattggggcctggtatgtcagcaattattattattattattttgagatggagtctcacactgtcgcccaggctggagtgcaatggcatgatctgggcttactgcaacctccacctcccaggttcacacgattctcctacctcagcctcctgagtgctgggattacaggcacataccaccatgcccagttaattttttgtatttttagtagagagggggtttcactatgttggtcaggctggtctcgaattcctgacctcgtgatccacctgcctcggctttccaaagtgctgggattacaggcgtgagccaccgcgcccggccgcaacttttttcttttttgagatggtgtctcgctctgttgcccaggctggagtgcagtggtgtgatctcagctcactgcaacctccgcctcctgggttcaagcaattctcgtgcctcagcctcccaagtactgaggattacaagtgcaaaacactgtgcctggctaatttttctattttcagtagagatggggtttcgccatgttggccagcctggtcttgaactcctgacctcaactgatccacccaccttgacctctcaaagtgcttacaggtgtgagccactgtgcccggccatcagcaactttttgatgttgcttcttagacagtgactatatcctcacatcctcacaaaaggaggttgactgcactccttaagggaatctacagaatcctaagagtgtgcagacagcagatgtttaatacatgtgtgttaaactgaaggctgtcatggctggcaaataaggctttttttcttcagtgccttttgtttcttgccaatcctcaatgctctgaaaaccctgttagtcagggctaggaaggaccaacaggcgtataagggaatgaaagcatcacaaacacatcgactaccattaccaaggtagccaaattaaaagggccctatacttacgtcatggttaggccgaaagatgtactaacctgaaaatgttaagacaaacacacagattgagattatccatgagatcctgctattggattcattaaaactgtccattaagtcattaaagaagacaccaaatgtcttgatgatgccgtaggtgaagacttcaacgaagaaaaatgaaacagctaccgcccagccccatcctccatcaggcacttcagtatacacattggctttggaacaaagctttaatttattttgggtcattcttaatctgaaagaaaaagttaaaagcaattcagatcagcaatagcatgaggatcgatgattctcatactcttaagcaaacaacagataagaactacttaccccatttcttaagttgttgaatatttatttatttatttatttattgagatggagtcttgctctgtcatccaggctagagtgcagtggcatgatctcagctcactgcaacctctgcaattctcctacgtcagcctcccaagtagctgggactacaggcatgtgccaccacagccagctaatgttttttctttttccttttttttttttttttttttgagacagagtctcactctgttgcccaggctgcagtgtagttgtgtgatcttggctcactgaaatctcggcctcccgggttcaagtgattctcctgcctcagcctcccgagtagctgggattacagatgcccaccatcacacccggctaatttttgtatttttagtagagatggggttttgccatgttggccaggctgggctcaaactcctgacctcaagggatccacccgccttgacctcccaaaatgctgggattataggcatgagccaccacacccagctgattgttgaatatttaaatcatgtacaagcagtataaagtatttggatacttttatgcatatatatgtatatacaaatcttggtattgtacatggggcctcccaaaaagaaagttaaatgggaaaaacagacatgaagaaccagagcagaatatttagaagcatattgaaggacaccaaatggccaccagaccaagtattaatgctgaccttgaaggactcaacttaggcaaaaaaagactgaattgaccataaggaatgttgatcagaaatgaagcctagaaaacggaggctgaaaagcaaacattggcggtgcatccagcaccttccaccgagtaagtgtttgagataccataagcgtctctgcttgatgtccctggccaccgcgatcacctagtcaactcttcttccccgccattttctactcagtaagcaatattctgattatgatttggtgttccatgtggatgtacctacacagacacaatgtcactataaatcaaaatgagggcattctgtcttctgggagtttgttaagcaggagtaatttcctcaaagttgaccaccacttagtatattagcaattgaatttccaagtacatgatgatactctagaatatggtgtctaaataaggtactattatacaagcctgtagggccccatctggacaccagttaactgagttacccctaacctcactgtgcctctccattcaaactgcaataaacatcagaacaagccaacctgtcttaacacttctaaggagacattgacattgacattggtttaacttaagtcttctggattgggctctagcacatgaatactgtctttttcaaagcctctgtaattacatatactttgaaacagtcatgtgtatttttagcctaactaaaaattaatgatatctataataatcaatgagtccatggtcttcaagctcttaatggcaaccaacttcaagtttaagaattctttatggctgggcgcggtggctcacacctgtaatcccagcactttgggaggccaaagcgggtggatcacctgaggtcaggagttcgagaccagcctggccaacatggcaaaaccccgtctctactaaaactacaaaaattagctgggcatggtggcaggcacctgtaatcccagctactcaggaagctgaggcaggagaattgcttgaacctgggaggaggaggttgcagtgagctgagactgcaccactgcactccagcctgggcaatagagcaactctgtctcaaaaaaaaaaaaaaaaaaaaagaattatttatatatgacccaaagcaatctacagagtggattcctatcaaaataccaatgacattcttcacagaaatagaagaaaaaaatcctaaaatttgtatggaaccacaaaagatcatgaatagccaaagccatcctgaaaaaaagaacaaagctggaggcatcacactaacagacctcaaaatatatgacaacacaacagtaatcaaaacagcatggtactggcataaaaacagacacactgaccaatggaacagaagagagaaccctgaaattaatccacatgtctacacccaactgatttttggcaaaggtgccaaagacattcattggagaaagttcagtctcttcaataaatggcactttgaaaactggatatcaatacaaacaatgaaactaaatccccacctttcaccctatacaacaatcaactaaaaatggatcaaagacttaaatgtaagacctaaaactataaaactactagaagaaaacataggggaaacactttaggacatttgtctgaggaaagatttttatggataagactggaagagcacacacaacaaaagcagaaataaacatgggattatattaagctaaacagattctgcgcagcaaaggaaacatatcaacagagtgaggccagatgtagtgtgtcacgctataatcccagcacttcgggatgccaaggtgggtggattacctgagctaaggcgtttgagaccagcctgggcaacatggtgagatgccatccttactgaaaatacgaaaaattaactgggcctggtggcacacacctgtagtcccagctgcttgggaggctgagggacgaggattgcttgaatccaggaggtggaggttgcagtgagctgagatcatgccacttcactctagcctgggtgacagaaggagactctgcctccaaaaaaaaaaaaaaagaatgaaaagacaacccacagaagggtagacaatatttgcaaactattcatctgacaggggattaatagccagaatatacaaggaactcaaacatcttaacagcaaaaaaactccccaacaatctggcttaaaaatgggtgaacaggctggtggcggtggctcacgcctgtaatcccagcactttgggagcctgaggcaggtggatcatgaggtcaagagatcgagaccatcctggccaacatagtgaaatcccgtctctactaaaaatacaaaaattagctgggcgtggtggcatgcacctctacacctgtagtcccagctactcgcgaggctgaggcaggagactcacttgaacctgggaggtggaggttgcagtgagccgagatcgtgccactgtactccagcctggtgacacagcgagactctgtctcaaataaataaataaataaataaaatgggtgaataatctgagcagacatttctcaaaagacatacatatggccaacaaatatatgaaaaaatgctcaacatcacaaatcattacggaaatccaaatcaaaaccacagtgaggtatcatcttacctcatttgggatggctatgatcagaagacaaaaaaataacaaatgctggcaaggatgcggagaaaagaactcttatacactgtcggtgggaatgtaaactagtacggccaataaggagaacagtatggagcttcctcaaaaaactacaaatataggaacacttttacactgctggtgggactgtaaactagttcaaccatggtggaagacagtgtggcaattcctcaaggatctagaactggaaataccatttgacccagccatcccattactgggtatatacccaaaggattataaatcatgctgctataaagacacatgcacacgtatgtttattgcggcactattcacaacagcaaagacttggaaccaatccaaatgtccatcaatgatagactggattaagaaaatgtggcacatatataccatggaatactatgcagccataaaaaaggatgagttcatgtccttggtagggacatggatgaagctggaaaccatcattctcagcaaactatcgcaaggacaaaaaaaacaaacaccacacgttctcactcataggtgggaattgaacaatgagaacacttggacacaggaaggggaacatcacacaccggggcctgtcgtggggttgggggaagggggagggatagcattaggagatatacctaatgttaaatgacgagttaatgggtgcagcacaccaacatggcacatctatacatatgtaacaaatctgcacgttgtgcacatgtaccctagaacttaaaaaaaaaaaaaactacacataggaccaggcgcagtggctcacgcctgtaatcccagcactttgggaaactgaggctggaggattgcttgagccctgcagtttgagaacagcctgggtaatatagggagacgctgtctctacaaaaaagtataagaagaaattagcagtgccgggcatggtggctcatgcctgtaatcccagaactttgggaggccgagatgggtggatcatgaggtcaggagtttgagagcagtctggccaacatagtgaaaccccatctctactaaaaaaaaaaaaaaaaaaaaaggccaggtgtgctggtgggtgcctgtaaccccagctacttgggaggctgaggcaggagaattgcttgaaccccggaggtggaggttgcagtgagctgagattgtgccactgcactccagcccgggtgacagtgcaagactctgtctcaaaaaaaaaaaaaaaagaaagaaaattagcggggtgtggtgacacatacctgtagtcccagccacttgggtggctgaggtgggaggattgcttgagttgaggctggaagcttgaggcggcagtaagaagtgatcacactactgcactcttgcctgaatgacagagcaagaccctgtctaaaaaaaatttttttttaagttggctggcgtggtggctcacacccataatcctatcactttaggaggtcgaggtggatgggtcacttgaggtcaggaattcaagaccagactgggccgggcgcagtggctcacgcctgtaatcctaacactttgggaggccgaggcaggcgaatcacgaggtcaggagatcaagaccattctggcaaacacgatgaaaccccgtctctactaaaaatacaaaaaaattagccaggcgtggtggcgggcgcctgtagtcccagctactccggaggctgaggcaggagaatggcgtgaacccgggaggcggagcttgcattgagccgagatcgcgccactgcactccagcctgggcgacagagtgagactccgtatcagaaaaaaaaaaaaaaggctgggcacggcggctcacgcctgtaatcccagcacactttgggaagctgaggcgggtggatcacctgaggttgggagtttgaaaccagcctgaccaacatggagaaacgctgtctctactaacaaactacagaaatgatccctgaaagtatagtcttgaaaccctgtctctactaaaaaaaaatacaaaattagccgggtgtggtggcgcacgcctgtaatcccagctacacgggaggctgaggcaggagaatcacttgaacctggaaggcagaggttgtggtgagccgagatcgtgctattgcactccagcctgggcaaaaagagcaaaactccgtctcaaaaaaaaaaaaaaaaaaagaccagcctggccaacatagcaaaacactgtctctactaaaaatacaaaaattagtagtagcacgagcctgttatcccagctacccaggaggctgaggcacgagaatcacttgaacctaggagtcggaggttgcagtgagccgaggtcacaccactgcactccagcctagagtgagcaatagagcaatagagtgagactctgtctcaaaaaaaaaaaaaaaaaaaaaagctgggcgcagtggctcatgcctgtaatcctttgggaggccaaggtaggtggatcacttgaggtcaggagtttgagaccagcctagccaacatggtgaaacccggtgtctgctaaaaatgcaaaaactagccaggtgtggtggcacgtgcctgtagtcccagctgctcaggaggctgaggttcacttgaacccgggaggcagaggttgcaatgagccaagatcgtgccactgcactccagtctgggtgacagagcaagactctgtctaaaataaataaataaaataataaataaaatgtaaaaagaaaattctttacaattatacaattgtatacaggtgaattttcagggtcagggtgcattatatcctttatatccttttcctagccataagttgttgggtcaaagttactaaggcaaaggttttattgaaagtagaaggcaactgaaaaataacaggacacaacctcatctatccaacagacttgctggttttctatttttaaaatctaatgttctgaatttactctacaaatcttaaaaagcagcaaatctgatctaacttagtatcattcatcctactgatagcgccattcccactgtagcctagtacttgggaaggactatatattcactttatacactattacggctaaatatttggttgattaaaataaggcataagatgctgtaagatgagtatgctctttgcagcaaaggcctttgcattttgatgtgtgttgatatgtcataaattatatgctcacaaaatctgaggtctatttctctttgtacaaccccatgtccccggaccctgcctgtaccttgtacacagcttgtatttatttttgcaacaaaatacctatcaggtgccaggtcctcgctttcactataggggcactacagtgaaaagaccaagagatggtctctgcctccatggactaaaatatttgctgatgatgatgctaaggaaaatgaatgcatctgaaatgcatcctatgtaaatgattcaaccacatcttgccagagttcagcacatttctgacaagcagtcaggactcagtagctactaagaccaaggtcaaattggcacagttgttctaacccagaaatgtgcccagaaggtcttaagagttttaatggagggctcaggaccaccttgaaacaaaacatatagtgataaaatttgataaagaccctagagagacgtggagtgcagtggcacgatcatagctcactgcagcctcaaaactcctgggctcgtgcagggcacggtggctcacacctgtaatcccagcactttgggaggccgaggtgggtggattgccttaggtcaggtttcgagatcagcctggccaacatggtgaaaccccgtctctactaaaattacaaaaattagcctggtgtggtggtgcgcacctgtgcttccagctactcgggaggctgcggtgggagaactgcttgaacccaggaggcagaggttgcagtgagctgagattgtgccgctgcgctccagcctgcgtgacaagaacgagactccgtctcaaaaaacaaaaacaaaaaaactcctgggctcaagtgaccctactcagcctctcaagtggctaggactataggtatgtgctaccatgcccagccaattttttttttttttaatttatgttttgagatggagtccaggctggaatgcagtggcatgatttcggctcactgccacctccatcccccaggttcaagcaattctttgcgtcagcctcccaagtagctgggattacagacgcccgccaccatgcccagctaatttgttgtatttttagtagagacagggtttcaccatgttggccaggccggtctggaactcctgacctcgtgatccacccacctcggcctcccaaagtgctgggattacagatgtgagccaccgcgcctggcataatttttattttttgtagagacagggtctcaccatgtggaccgggctgtgggttgcatttagatgagtgggaccagattgcagtttttgtatgagctgagattacctgccatcatgagaaggctctgtctggccagcactgaagttctggtgccagctgcccctttcctctcttcccttgcctgtatcatcagatgtttacacttgcaaaagggatggggctaggatgaatctgtaacccctgaatagagttagaattattgaatgttaaagctgaaggggaaaattgaggttatctttttcaattcctttttgtaaaatcttactcattttgtaaaatcgggaaactgatccccaagaggtgaagggacttgactgaaatagcccaatactgaatctcctgccttccagggctcctgctgtacaagcctacaggagagcattttattgtatttaatttttttgagatggagtcttgctatgtcacctaggctgaagtgcagtggcacgatcttggctcactgcaaccttagcctcccgggttcaagcgattcttctgcctcagcctcccgagtagctgggattacaggcacccaccatcatgcccggttgatttttgtatttttagtagagatgaggtttcagtatgttagctaggctggtctcgaactcctgacctcaagtgatctgcccgccttggcctcccaaagtgtgggattacaggtgtgagaaacagctgatacttttgaatttagtactgaattctattaatcaactgatggcttaagcgaagcctggtggcccaaggaaactgagctcggagaaagtgtaaatgctagatggttcttgcaaacatgggtgtaaagtagctagctggtcattgcttagatctattctatgacagctgtttagaagatggtggactttttgtttttgtttttggagatggagtttcgctcttgttgcctaggctggagtgccatggcacaatctcagctcactgcaacctccacctcccgggttcaagtgattctcctgccttagcctcccaagaagctgggattacaggcatgcgccaccatgcccggctaattttgttttagtagagatggagtttcaccatgttggtcaggctggtcttgaactcctaacctcaggtgatctgcctgctttggcctcccaaagtgatagtattaaacgttagatagtatctaaacgatagtgctgggattacacgcgtgagccagcatgcccagccttcttcttcttctttttttttttaatagagacagggtctccctatgttgcctaggctggtctggaactcccggactcaagcgatcctcccacctcggcctcccaaagtgatagtattaaacgtgtgagccacctcacctagccagatggtggactattcatttctatttcctttctgagccactgctgggaagttaattccttagtttttttaaaaaactctgctttatgtctgagctattctactctagctagagccacatataactttcacctgcattcttgggtttttggacagaagctttcttttctttttataactgagatctccatcaaggaaagatgacaccctgaaccccgtcctacccccaaggtttatgcctttatcatcctaaagcatcctatgtcctattaaatttagctttgaagataagaccacaatataaagtaataacaggataacctggtttctgaaccttcctgggtgataatgcctgtatttaagtaaagtcatgcacaggtctttccttaaaaaaccgagtcataaggggagaaagtgcttggttgcagaataaaacccttcctggactcttctcccttttttcttttctcttctcttcttctcttctctctctctttctctctctctctctctccccctccctccctcctttcttttttttttttttttgggggttggggatggagtctcagtctgtctcccaggctggagcacagtggtgcgatctcagcccactgcaagctctgcctcccgggttcaagcgactctcctgcctcagcctcctgagtagttgggattaaaggcgcatgccaccacgcccggctgattttttttttgtatttttagtagagacagggtttcaccatgttggtcagactggtctcaaactcctgaccttgtgatccgcccgcctcagcctcccaaagtgctgggattacaggcgtgagccactgtgcccggccttctccttttctttttttccattccttcagcagaaggccaaaccttctgtctctgcaaacaaagcaactgaggcctgaattttgaactcatttatgcagaagcctctgtaagttccagaatataaaagtttatctgtccactttggtctgtggccatgtgaatttatctgacgggtagggatatttttcagctgtgtagggatctaactggtgaggcgagctgagtcatcctgcccatcaacccctgctttacggatgatggaatttaggcaaatcacttcacttccccattttcaatgtcaatgtaaaatcaaggtaaatgtaaaaaagggagttgaactagactctgatgagcttagatctcttcctgccctaatagtctatacttctatgacagcctttgaccgtcacttgctttaatccttctaagccctttgaaggcaaggccgaagagttggtcttcttaaagctcttaggccatatttgttaatttctgtgtaccattaactggctgcacagttatggaaaccacagaatcctgaacttctagaacttctatcatctgtaaagcatgggttgtcaggggagtctctcaagccttttccaacttacaaaactcgacaattctgaatgggggttcccggcagccatcttcccttcaccctagtgttcttctggaggaagtacaatgacacaatccacgggcagtttggaggatttcctagtagcatgtggttaagtgtccccttaaataaatgagtattggccgggtgcggtagctcatgcctataatcccagcaattagggaggccgaagcaggcagattacttgagcccaggagtttgagaccaacccgggcaacatagtgaggctgtgtctctacaaaaaaattaaaaaatgaggtgggaggatcgcttgagcccgggaggtcgaggctgcaatgagcagagatgacgctactgcactcccatgatgggagtgagaccctgcctctaaacaaataaataagtaggtatcttgccaaaggcttggaaatccgctatccttgggagtttcactgtgatttaatttgtcgagagaagatttggcccgagggcatgaaaaaaattgtattattgtagaccatcagagtgttattccagggtcagctaagagcaagtttcaaaacgcaggctctggatggaaatggggtggctactgttgtaggcagacctcgagcaaaagcactgcggatttctcttcttcttaaaggcgtagcccggagaacagctttgacaagttgtttctggcccaagttgtcaaaaccagtctgtatttggctaaagttcatctgcattctctatttaaaaaaaatttccaaacctaacctggatagctgcctcacgatgttgaatcactggctacaaccgagtcaccattttacaagactatggtgttgaaacctgagcccctaatttaagtgtcctcctcaggagttccactgaggaaagtcctttttcggaaaccacagaaggaaaactcagggttagtggtactcattacactggaaggagcttttccacttggctgcattgtttatttacacactgtaagttcctattttggacactcttcccttaattatgagaagaggggtttctattatatcatctggccggatgtattgttgaccccaaaaatgccacataacggtgcttgggacatggggagatgcatggtttagagatttcagcataagcacttggcatcttttttacaagcaagacacctatcttaccatgatttgcaaaaacaatcagatcactgagaaatctcattcccggggtagaaaccatctcctgcgagaaggagctggcacggagtgtctaaccgtgcaaacaaaaccggcttccaggttgacaagttgtaattgctcttccccagttggctccggggagctttttctaagactgacgccccccatgtttggtgacattttatatacgccacctaacaaacttctatgacctgtcttgctagggtggggggaataaaaagaaaagacgacaacaacctagaaggaaataacccatttcctctgcaaaaccatcttcccttgctacggaactgcttggcgacaccagcgctttcctgcggttggcagcccgggaaccttgaagttgcgcgggaccggccgtcagccgctgacagttctgacagtccaggtggaggacccgcgctctgccgggaaatccccggcttcccgctggggacaaacggtggccgccgcagggagtgctgtgtttgggggtcgggggaggcagggagccccactttccctcgcgctgcctcagtgcccggcctgcgtgcgcgcgccagcctggggtaggaaggtacctctgacatttcgctcctgcgacgcgcaggcaacttcatgcggaaaatccgcggaggggctgagcctggagcccccgactcttccgacgtcccggagcccccaacccggggcagggggcactcaaaggccaggcgtgcctttaggtatcttccgggacccaactgtaccagggtcacggacattcaactctcagctacccacaccggcgcgagcgcgtcatcccggtggccctgggcattcctaactgtcagagcgaatatttttgggaataacctctccaaaatgtgaagatgttcagtggtctcctccgcctcccatcacaaaaaaaggccccaacacatattttttaaaaaacaacccacatcccacaatcaaacttttaaacatgtaaaataataaaccaactcaccaagttagaagggaagagaataaacccccaaaggctcccaataaggcggaggcttggcctccccctccttataagccgctcggtaacatgagaaaaggattaaccccttagggggcgggcccgactctagcgcaagttggctcgggctggtgaggcccgagcgcccgggccctccacccactcccgcgactcgggcacccgagccacaccctccccccgccccccaccccggccgcctgcgacccgggccgtgcgtgctgccgcccgcgccccggccccgcgtcgctgcctagctcttatcctataccggctgcagccggtctccgccggcctcgggggcgcgccgccgccgaccatgtgctgcgagcgctgagcgcagccaaggagggggcctgcctggcgcgcgcgcgccgtcccacgtggacctgagccgcgccggtcgcgcgcccgccagcctgccgcctgggctgggggtcacgaaaggtaaccgcgtcgcggtccggggccgggccgcccccgccagcgccgccggggtccttggcacaacgccccgatctcccaacccgggtgcgcctctgcgcgcgtgacccgcccagaccccggagctttgctgcaacgctagtaggagcgcgagcgtgcagggtgttgggggtgcctgcatcctgtctcggagcacctcggccaggcgcgagcgcgcgggtccccgtccccacccccgggcgccttcccggcgcgcccaccgcccagtcccgcccgcgccctgaggatttagggatttagcggcgagggggaacacgcgcgcgccggggctgatcccgcgcggcgctcgcggctgcggcggcttcgcgcccgccccgggcagaacaggttccttccagtttgggtgtgagctgcgcgcgcggcgcctgagttcctcctgcagcgcccacttcccccagtttcgtcaactcgcgcacccccacagttccccttccggcagtggggagggagtgtcgcagtgggccccagggagcgagcggccgggccgctgcgggtgccttgcttcccccactttgctgcaccggcagcagcggcagcaacagcatccgcgttgcgcgaaaggaatgtgagcagccgggctgagtcagcatccccggcccggggcgcgcgcgcaccctccaggcagtggcggcgtcggcacaggtgcatggctcccatacccgcggggagccctctgtaagggacctggaggtttagacagtccgtgcccctcatcccgtagtccccgaccccaaggtcaccgtgaactaagcggatgatgcacgcgaaatctcaggagctcctcatggggacaaagcatgtgtcagatcctagacatttcagagcctgcgggggcgcaaacttagcttcttggtctctacctcacatcccgagggcaaatttggaaactgctcggaagcaaaggccatgttatttgcattcgtatgcagactttggcgccggctgctgccttcattggggttcggagaatgtggttctgatgtcagaaactcaagagagcctagtttgggagtgcatgcacggagggtcgccaccgggaggagtcggcgatctgaattttaataaaaatccttccttgctcgctgagttctctcaccattttgggataggctctcctgagttaaatgccatcctttgccgttgacaagttctggttgtgtaagtggggagaagattcgttggtacagggtgccttgtatggccagtagtgtacagccaaggggccgctgagcagctttgcaaccttgtaggcgtaatttaacctcgtagagcgttaatttctccagatctgtaaaatggggatggaggtggtattcccagaattggagggtttaatttatggtacttgtaaagtgcggatcgcagtgactggcatttggtaaggcctcagtacccattagctcttgctgctgttacgatttatgctttaccaaggccaattaattgctgactccaacacactccctgtgagagagagcccttttttgagttgttcttcaaaggatccatatataatgatatttagaaactgatttgaacacttcatgctaatgcagggctgcctgtaagataatctttgatatttaggatcttacactttaatacttaggacctgttactgtactctatatggaaatatcatgtgcaatatgacagcatattctgtatgtcttaggaacctaaaggtgcagccagccatttatacctgagtgactcgaagcaagtcacataaaatctctgtacttcagtctcttgatttaaaaaatgactcaaattatacctaaatcctcaggagtgaatgaatgattggaaaaatcacatctgaatgtttgagcaagtgaaacctggcttttggggagcatgattctaataataataataataataataatagatttttgttactaatgtgttactattcttatattttattaatattaatcttttttaaatgtttgctttgtcctcaacactgcattaagtgccatacatgtaatgcaatgttaaccgcatcagtaaccttctgtagttgacactcattattcccattttacagatgaggaaagtggaggcactgagcactggagggattgacctaaggttacaccatgtttatagatacacactagcactttttaccactagagctcatccaaagatgacatttgccatctgtgtttgaataatggagaggtagctggaaacccaacctacgcacagccttgctagtcacaaaaaagtcacgcaacatgacttttgcccaccctagttagaggctggcttcaccttgttccctcaatcctagtgagaccaagcgtgaaaacccctgcttttttaacttctccagagaaagcactgcattgccatgctaatcaacgcccccttgcccccaaacaaaactaactctgtttagttctaaataagaacaaaagaacctttggagtctggagtacaggaccagaaaaatcaggaaatcaagtgaagggctcagctcccctcttagcctctcctgttgtgtctgcctgatcccaagtggcaggcagagccccctctcggctttcctttacagtgggcaagaccatcatgatgcccttaagaagacccccaacatcttcttggggaaaaagttggctcttcagagctgtccccaaggctccctcttttagccctcttgcatagggtcatttgcatgagaacagattcctttgtgtaaagttggcctgcctgttctctgtccacgtttatagtccttcaagtcttcgtgttgggttgctaggcagatatgaccctggcttgcaaataagctcactgcatttaccagcctgtgagaacttcaacttgggtaagtagactgaaaggaatctggtctggacctctgggaagagggtcccgcaagcctgcttttgggggctgactcttcagggcagccatcaaagggggagaatatgtgaagggggcttccatgggaggcttcgatggcccacccacccttccattcttcctcttccagtctctgttccacccaccatgctcccacccaggggcttgtgttctgggcaagtgacttgtatgccactgaagcaatttcttgctttaaaactttaatatctgcttctccaattggccaggaacttcacacactctgccatctagcaacagtgaaccgatggtacaggtagttctgctaggtttattttgtgatttgggttcctcccccgcagcaccccgccaaatttcacagtttgtaggaaggcagggcccttcaaactgggaaacacacacttctgggagaatttaaagatttgccaaggggttctgaggcacagatagtgatgacgatgataataataatactacagagttgtgtgcatggcttagtacagttgctaagttaactgaattaacacgtgcaaggggcttagcactgggattggctcatggtcaggttccctaactcttggctgcgactctttcaacctgtgagtcctgggggattgaggaggatggcgatcagggaagccttcaactggcagagaggaccttgggagaactggcaaggggtgctgagccaagggagaggtgaacagcatgagaagaaggtaggaggtaggtgaggccattctgtatttggggacagtgaggtcaccttcccactcgtgtgtgtgggcggccgatgattgatttctgtcatacctgttaccatttggtgcagtatcgatgtatcgttggtgtctgtcattaactctgaagtaacttttacttgatcagtactgaatttcattcctaggcttctcagtcttcatagttgactgctcctgtagttttgccatttattactgcttaaaaattaaaaaaaaaaatagagaacatagcctccgggaggcttctataaattatctcaagcctgttgcaaaagtcctagaaaacaaacccaggctgagtgtgataatcctagtgcttttggcatgaaggcaggaggattgcttgaagaccaaacgtttgagaccagcctgggcaacacggcaagacaccacatctaagacaaattttttttttttttttttttttttttgagatggagtcttcctctgttgcccaggctggagtgcagtggcgcgatcttggctcactgcaacctctgcctcccgggttcaagcaattctcctgcctcagcctcccaagtagctgggactacaggtgtgtgccaccatgcctggctaatttttgtacttttagtagagacagggttttaccatgttggccaggctggtctcgaactcctggcctcaggtgatccacccacctcagcctcccacagtgctgggattataggcatgagccactgctccggcctaaaaaatatatatttttaaaaaattagctgggtgtggtggtgctgtcacaccactgcacttcagcctgggcaacagagtaagaccctgtctcaaaccaaccaaccaactccaaatctcagaacaaaattatttaaatcacattacatttaggagtgaatgcacgtcacattaaactgtgtgacacagttgtgggtcgtgggatctcattggcaatattgggaagggctgtgtgtgggaccagtggattttgccccgatcgagtcacgctttcttcagatagttgttgaagttgttccacctgccctgttcctcaaggcccaatgaataaaaacctgctctcctgctgtgtttcttgcctaaagggagatgctgactttccctatcttgtctaaacaggtacctcctgtcctgtgtttctagattcccaggaacaataggcaatgttaagcttccattttaaccctttaggagcagtgcctccgtgagtttccagatggctaggggacgatgcgaagaaactacaaggatgctgcaggattgtgttgtgggcaaatggtgaggaggggccccgccctgctgtgatcggtgggggcctgtggagttaggtgagctttgtagggatacacagcaggactgggtccagggagcatccatccctccatccttccctcccatgcccatcgttcatccgtccatccacccaagcggcctctgctcatccatagcccactcgtgagcactgacaactgctgttgtctcccaggccacaaaaccacacctcagaggatgtggttccttctctcatagtgtgtatagtttagttcagaagacaggacacatgcgattgttacgtaaaacagcatttcaacaagtacaattttacaagtgagaattacaagtgaatgtcttctaagaaagaacttagaaaagtcatctaagttgaggggaatgatgagatgaagctggcagggcgaggcagagcaggctgggctgttgatgttcatgttacatgcactcatccagcaaatattgactgaataccttctgggccgggtgccggaattatgcagtgcataaactatacagaatgtccctgcctttacagagtttccgccctggagttgtagatctttcttgcttgagcacctagctagccaagcatcctggacaaagagttcttttgaaatgtttctgatatggaaatgtaacttccattttcaattaacatcaacaaaggggagattcccctcacacgcatcctacatcttgacctcatattgttaaattgtccgaaaccagatttgctggaaggcagcatactccaaggatgccagctattattagagtctgcttggctgaagggacctggctcaggtttagccaagatggcacagatagtcatgggattgtgtaacaaggaaccatagtttggaacgttgaaaatgtaaactgaaatcagtctttatttcctctttgccttgtttgtgactatggtggcgtgtttgtagcttctgtcttctctaggttcagaaaccagcatcagagcttgcttaacaaacaattctggcagattcagccagtagctgcagggagtctggattttgccatctatactcagaatagttatgtttttatctttttttaaaattaaaaaaattttttttctaatagagatggggtcttgctatgttgcccaggttggtctggaactcctggggtcaggtgatcctcctgtctcggcatcccagagtgttgggattacaggcgtgagccgctgtgcccagccattatgttttattttaatgttagtaacgctttggcttgcatagcacatttttagtgtgttctcatatttattatccctttatcctcaaaacaatcaagagatggactaacagtagccaatatttcttagcacttactgagaacttgggttggattatttcattctcacattgtgtttggggttgagaaagtttactgtgactcttttttttttttttttttcccctgatatctaattccaggccaaaactccatttttcaggtaagggaggaaactgagacacaaagagattctgtaacatatccatggtcacacagctggcaaatcactgctgaatcccggatacatactcctctggaaataacacatctcaaaagtcaattccccaaaaggcaaatttgctaagtaactgcttcactaaattgtttttttcctaaatttgggtcttacccctatttctgcccctacctgagccttggcttcagagattcctaaaactttaggggaatctgtcttggggtgctcaggatgccataataaaataccatggactaggctgggcttggtgccccacatctgtaatcccagcaatttgggagggtgaggtgggtggatcactttgagatcaggagttcaagaccagtctggtgaaaccctgtctctactaaaaatataaaaattagctgggcatggtggtgtgcatctgtagtcccagctacttgtgaggctgaggcacgagaatcacttgaacccaggaggtggaggttgcagtgagctgagattgctctactgccctccagcctgggtgacagagcgggatcctgtctcaaaaaaaaaaaaaaaaaaaaaagagaagaacactactgtagactaacaacagaaatttacaaaaatacagcccaaacaacagaaatttattgtttacagttctggaggctggccagtttggttcctggtgagggctctcttcctggcctgcagacagccaccttcttgctgtgtcctcacatggcagagagagtgagcaagcaagttctctgatgtttcttcttgtaaaggcactaatcccattatctcatgacctcatctaagccttatcacccctccaaaggcctatcttcaaatatcatcacactgagagttagggcttcaacatacaaattttgggggcacacaaacttttagtttataaaaacatatttcattgagaaagtagaatggatccagggcaaggataaatctacaaaaatagaaaagatagtacaaagcactgtttttcttaagagaaagtttcctattctcatgcaaaaatgacaaagggaaaaaaattgaacttttttttttttttttttttttgagacagagtctcactctgttgcccaggctggagtgcagtggcactgtgttggctcactgcaacctccgtctcctgggttcaagcaattctcctgcctcagcctcctgagtagccaggattacaggcgcccaccaccacgcccggctaatttttatatttttagtagagatggggtttcaccatgttgaccaggctggtctcgaactcctgacgtcaggtgatctgcccacctcggcctcccaaagtgctgggattacaggcatgagccaccgcgcctagctgaaaaaatggaacgttgacacgtaaaccactgatcaggctgaacatgacaaggggaaagatatgatgcataaggtgggcctgccaaaaaaaaaatcgaacctggatcggatctcatcctagatctacaagccagtttaccaggaaaacgggtccagggaacatttcaatagaggatacaatcagctaaatccaaaatttgagaaatgttacagggcaaacaccgtaatttatttacaaatctatgcagagaaaggaagaggggagccataaatgaaaagaaaagagacacgtgaaccaagtgcagtgtgttgtgaaccttgtctggatactgattagaacaaaccaactgttaaaaaaatactgatgagataatggaggacatttgaactctgattggatttttgatgatactaaccaattgttaatttttaaaaggagggtgttatggaattgtagttatatagtaagaattaacttttagagaattgtaccaaaatacttctggataaaattatatgatatttggtattgctttttttttttttttttaagagacagggtcttgctctgttgcccaggctggagtgcagtgacatgatcacagctcacttgcagccttgaactcctgagctccagccatcttcccacttcagcctccctagcagctgggactacaggcacatgccaccatatccagttattttgttgttgttgttgttgcagagagatggggtctcgctttgttgccaaggctggcctctaacccctggccgcaggtgatcctcctgcctcagcctcccaaagcgctgggattacacgtgtggcccaccacgcctggcctggggcttatttcaaaataatccagcatatgtggagagggaggctaagggaaattgaaggagagagccagcctgaccatgtgttgataattgttgaattgaaatgttgggtaagtacatgtgagtttctcaacttttgtgtgtttgacaacttccataataaaatgtttaataagtgataagtaaatacagctttgtaaaaggttcttaaaaatgtggcaaacaggcttccagtgagcgaatttcagacattgacctggagctttcttcttgatcatacccctcaggatttttcttctcaagtggaggatagacttttagaggaaagacgttattcagaggtccatctcctctctctgatctgtgagcgaggacacagatataatttccgcagggctactgggtttttagatgcatggcgtgatgccacctaggctctctcaaactggctcctgcaacatggctttcttctgtgacagtctcaacaggtggttcgagcctaaaactaggcaggatgtcatatgccccctgtggatgggtttcctggcatcgttgggttcacagaaatgatattgcccgaaacagtgtctggtgtgaggtctccaagctttaaaaaaaaaaaaagccactttgggaggccaaggtgggtagatcacgaagtcaggagatcgagaccatcctggctaacatggtgaaaccccgtctctactaaaaatacaaaaaattagccgggcgtggtggcgggcgcctgtagtcccagctactcgggaggctgaggcaggagaatggtgtgaacctggaaggcggagcttgcagtgagccgagatcgcaccactgcactccagcctgggtgacagagtgagactccgtctcaaaaaaaaaaaaaaagcattttaattacgtaagtgaaattgctctcccaggctggatagaggcattcaaagatgtcttgtgcatcttctgttgagcttagactactacatcttggcccctacactctaagaaagcagtctttccaagttgggctagcctcaaaattacatattggggtctatgggcaaaagcctgggacacaaggatgtttattacatgtagataataaataaccctttgtcctggctatcgtggtaactgggttttccttttcacctggatggactagggtgaggcaacatgtaaggaagtgctcactgcccaggtggtgcgagtacagggtggctacccgagcagaagggccacctcctgacgttttgtgccctaggcattttgcttgtctcgctctagcactgtctctcacctggactcacctggacccatgcaagagactcctaactcagctgcttctttcatctgctgccctgcggggcatttgtgtattctcaacagggcagggattctgttacaatgtaaaccagagcctgctgctcttgctgaatccctctggcttcccatctctcgcagcaaaagcctttctttcctctctgactctaatccctgcccttcctttctccattgcttctgcagtggcttctttgccgctccttgcttgtgccagacctcagcctttcccagtttctctgcctttcctgcttggcttcctgatggctgcgtagcttcctccctgacctcacacagatccttatccaaattgtgttttctcgatgagattgtcccagaccaccccctttaactttgcagcctccatcccatgcctgagctccttctttgatgttcttcacgctatttacattttattgatttcatttctcccctcactgtcaaaaaagtaagtggtgtgagggcagggacttttgtctgtttcatttacggctgtatgcactatgcctggtttaaaatctgtcagtcagtacaaatttggtggacagatgacagaatgcgttggggagttgcttccgacaacacgtgagcagctgatgcccaaggccccttctgacagcccctgatggctcgtggccgccagccagcacacagaccatgttctgatctggggagtaaaacaacagcagtccacatcccagagacctgctcccccctgctcttttgtcttttttggcctcggctcatcagatgcttttgtctctggaaaaccaacagaaccctctgccagaaaggtctgcccgaccttcttgttatttcagctgttttcaaggttctctaggaggatgcttggccacagggaggcccatgggaaacgagggtcaggtgatgaagtgagtggctcaggaagcccaaggacttcagctctgtgttttcagacactgctcagcagatcttcaggttgctgcattccattcgcttctcagtgcttctggcccacagcctgcctgtgggtcatttggctgtttatcagtacctttacccctaagcaagcctggaaactgaagggaggtcaaacttgagcacacttagcagccctgctttaaaatgggggtcgtggagaagaataggaatcatgggtaaagctgattgtcaactaaagttcactctgctcctgcttggggagcatgagacatgggaaattgtttatgcttgtgctcaacaaggatctttcacagtcagttgtgctctgatggagcagatgggccttcgttgtgggatttgttgactgacgtggccgagtaccttctgccccagtggaaggaggggtgaatgctgtatttgccaaagactctgcctttctttatagccaggagtgctccttccctgtgtctactctcctttctgagagtgatggagaaagaaaaagctggcaaaataacatcagataagatctgagggtagcaagtaaggccattttcttttcttcctttgttctaggggctagatgcaatcaaatgcttggcttatatagctgtatgtttggaggtattgttttcagagacaggatcttgctctgttgcccaggctggagtacagtggcaccatcatagctcgccacagccttgaactcctgggctccagtggtccttccacctcagtttcccaagtatctgggattgtagatgtacaccaccatgcgtggctaattttttaatttttttgtagagatcaggtctcgccatcttgcccaggctggtctccaactctcaggctcaagcagtcctcccaccttgcctcccaaagtgctgggattacaggcatgagccactgagtctggctatggaaccattttccttatatttttgtttcgttttattttttgagatggagtctcactctgtcacccaggttggagtgcagtggcgcaatctcagctcactgcaacccccgcctcccaggttcaagcgattctcctgcctcagcctcccaagcagctgggactacaggtgcacgccactatgcctggctaattttttgtatttttagtagagatggggcttcaccatgttgaccaggctggtcttgaactcctgacctcaggtgatctgcctgccttggcttcccaaagtgctgagattacaggcatgagccaccgcacccagccccattttccttatagcacttgagctcaacgtttgagcttagatcttaatcaaagtctgtacctgggcatccattctttgagtgtctggtctgccttttccatttagttaacaaaaatggggaaaggattaaatgtttccctggaggtgtgggtgtgaagaataatgcagtggtctgctggctagattcgcttatttccattctatgaacattttaagtaatgattctctttgaaaatcctcaatggaatgtttcatcatggaacactgaagaaacacaatctgtttatttatattcccacctaaattttagcttctttcttaagtgaattttttttccctgaagtcttgtacatgggatccattctgaaatggattattgaccaggcatgaggccactctagtgttccaagctaagaagctttaagaggaaaagtctcctgtgtctgttgcacatggtcagaagccagtagaatgatctcggaatcaagcagcaggtccacaggtgtttgttaaccaccctccttgtgctgaggctctttctcctgaaaagggagatgcctttggagtcttaagatcaacaaataccagttgagtctaattgagtttgagataatacatctccttttgggaaacagaagaatttgcatttctgaacaattgattcattggcctccagatgacatgactgtttacttggatttccttttagtttgattaagtacatatttgcccattcttttggtttttatcccggtcttccaaaatttacatacctctaaccacccccatccatgtggattgatcaattgggttggcttgcaaggatgtacaactggaaaaagtgtctgtcataatcccaggcctatcttttttacacagtggttctcctttaatctgctccatacactggatgttcaactgaagctttgttgttgttgttgttaattttagatttaaaaaatacagataaggtctcactatgttggacaggctgatcttgaaccgctagcctcaagtaatccttccgcctcggcctcccaaagtgttgggattacaggaatgaaccacaatgcccagccaactgaaatttttgtttggtccacaatttcaactctgttcctccttattaaacttgcaaattggctggatgtggtgactcatgcatgtaatcccagcactttgagaggttgaggtgggaggatcacttgaacccaggagttccagactggcctgggcaatatagtgagatccagtctgtacaaaaagtaaaaaaattagctgggcgtggtggcatacacttgtaattctagctacccgggaggctgaggcagaaggatcgtttgaacccaggagtttgagattgcagtgagctgggatctgtctctttaaaaataaatacataaataaaataaacttgcaaatttagggcttttaagtgaactagagctaatctagttttatccttggctccatttgcaacctgcagcttaaagtataaccttcaattcccgtctttcaaaactcaagtctgatttgtcgtttttatttgtccactgaagttgagtcatcagttagattaagcagtttcctttttcttcttgcactagcctcatgatgtttttgttttccagcaactttgctgcttaaagtgtgatccaaagacgagcagtacaggcctcacatgggcttgttagaaatacagatcccaggcccagccttacctactgaatctgcggtttaatcaacataaaatccacagcagattcatatgtacctccatgtgtaagatgcaccactggttgaacatgtctttagattttcttattaaaattacatggctaggatgcaaagggacacatttccatgaaaaaaattttttgaaattttttctaacattttattatgaaaattacaaacatacagcaaaattaaaagagttctttagtaagcacccatatatctgctacctagattctattattaactttttaaaaccatttccttttcccccagattaacttctgtcaagaattttggctgggcctgggtgtggtggctcacacctgtaatcccagcacttaaggaggccaaggcgggcagatcacttgagaggtcaggagttcgagaccagcctggccaacatggtgaaaccccgtttctaccaaaaatacaaaaattagctggggtgtgttggtgggcacctgtaatcccagctactaggaggctgaggcatgagaatttcttttttctttttcttctttttttttttgagatggagttttgttcttgttgcccaggctggagtgcagtggtgcgatctcagctcgccgcaatctctgcctcctgggttcaagcgattctcttgcctcagcctcccaagtagctgggattgcaggcatacgccaccatgcccggctcattttgtatttttagtagaactggggtttctccatgttggtcaggctggtctcaaactcccaacctcaggtgatccgcccgccttgacctcccaaagtgctgggattacaggtgtgaaccaccgctccctgcgagaatttcttgaacccgggaggcggaggtttcagtgagccgagattgtgccattgcactccagcctgggtgacagagtgagactcagtctcaaaaaaaaaagaattttagctggtcatagtggcacatgcctgtaatcccagctatgtgggaggttgaggcaagaggatgacttgagccaggagttcaagactggcctaggcaacgtagcaggaccctatctccaaaaatttttttaaatgtagaaacattaggttatagcttgactgttacaaataaccatgtcttggtaataagggtctcacctctccttctggaattctcagtggcacactgggatttagcagcattgggggctggtcctggtcccacccagaacactgggcctcaatatcctcatctctacagtgagtgggttggcagagatcatctctaatgttacttccaaccctgtcgctataggtccattgcgaatattattatcatcactatttttcaggtggagaaactgatgaaccagttaaatatttgaataaaaacatctgttggcatggaaaagtgattatttcctaagctactgagtaaaacacagctgcactggcagttttaactctgttttcttgtcaatttttgttctttcaggaaaccttacagaaacatgaagccctcaaccatctgctactcagttattcggggctgacggcggcttctagaacatccaggtgttctgcagatgcgagaactcatcctgtagtcaccagatggagtcccaaacagccaagcagatgtaaggcctgtgctgtggctctgaggccctgaatacagaagggtcactttcttagtggccaaagagcagttgttgacattgatgtctaattattgaacacgaccagtcattttactgagctgcggtgaggaaacactgaccatagaagatcaagccaaatgagggattgcaaatttcctgattcttttgaattaggattccagatgggggcctcatttctacagcccccaacattcctatagccgttatcactgccatcaccactgccaccagcatcttcttgcagattccacccctgctccccagagacttcctgctttgaaagtgagcagaaaggaagctctcagaaaaatctctagtggtggctgccgtcgctccagacaatcggaatcctgccttcaccaccatgggctggctttttctaaaggttttgttggcgggagtgagtttctcaggatttctttatcctcttgtggatttttgcatcagtgggaaaacaagaggacagaagccaaactttgtgattattttggccgatgacatggggtggggtgacctgggagcaaactgggcagaaacaaaggacactgccaaccttgataagatggcttcggagggaatgaggtgagtcttgagatgccaggccagcctttctttggatgtcttactcccgttcttgagaggggaaggggccgtgcaaagcacttaaagagtcattgatggacccatgctgatttagttaatttattaattaatttggtttgaagccagcatagcatcgtgaagaaatccagccatctagcacccatccatctatctagtaacattcattatgtgttaggagctaggaatacagaggtgaacaagataaaacatttttgccctcaagttattcattgtctggtagagaagacaggttaaaaggaaagtaaggggctaggtacagtggctcatggctgtaatcccaatgctttgggagactcaggtgggaggttcacctgagcccatgattttgggaccagcttgggcaacctggcaagatcccacttctacaaaaaataaaagcaaattagctagcggtggtggcacgctcctgtggtctcagctactcgggaggctgaagtgggagtgtgtctggaattggtgggttcttggtctcactgacttcaagaatgaagctgcaaaccctcgcggtgagtgttacagctcttaaggtggcacgtctggagtttgttccttctgatgttcagatgtgttcggagtttcttccttctggtgggttcatggtctcactggctcaggagtgaagctgcagaccttcacggtgagtgttacagttcttaaggcggtgcgtctggagttgttcgttcctcccggtgggctcgtggtctcgctggcttcaggagtgaagctgcagaccttcatggtgagtgttacagctcataaaagcagtgtggacccaaagagtgagcagtagcaagatttattgcagagagcgaaagaacaaagcttccacagtgtggaaagggacctgagcgggttgccactgctggctcgggcagcctgcttttattctcttatctggccccacccacatcctgctgattggtagagctgagtggcctgttttgacagggtgctgattggtgtgtttacaaaccttgagctagatacagagtgccgattggtgtatttacaatccctgagctagacataaaggttctccaaggccccaccagactcaggagcccagctggcttcacccagtggatcccgcaccggcgctgcaggtggagctgcctgccagtcccgcgccctgcgcctgcactcctcagcctttgggtggtcgatgggactgggcgctgtggagcagggggtggtgctcgaggaggctcgggccgcacaggagcccacggagggggtgggaggctcaggcatggcgggctgcaggtcccgagccctgccccacaggaaggcagctaaggctcggtgagaaatcgagtgcagtgctggtgggctggccctgctgagggacctagtacaccctccgcagctgctggcccgggttctaagcccctcattgcccggggcccgcagggccagctggctgctccgagtgcggggcccgccaagcccacgcccacccggaactccagctggcccacaagcgcagcacgcagccccagttcccgctcgcgcctctccctccacacctccctgcaagccgagggagccggctctcgccttggccagcctagaaaggggatcctacagtgcagcggtgggctgaagggctcaagtgccaccaaagtgggagcccaggcagaggaggcgccgagagcgagcgagggctgtgaggactgccagcacgctgtcacctctcaggaggatcactggagcccaggagttcaaggttgcagtgagctatgattgtgccactgcactccagtgtgggtcacagagcgagactctgtctcttaaaaaataagtaaataggctgggtgcagtggctcacgcctgtagcactttgggaggctgaggcaggtggatcacctgaggtcaagagttcgagactagcctggccaacctgccgaaaccctctctctactaaaaatacaaaatgtagccgggcgcagtggcaggcacctgtgaccccagctactcgggaggctgaggcaggagaatcacttgaacctgggaggcagaggttgcagtgagctgagatcgcaccactgcactccagcctgggcaataagagtgagactctgtctaaaaaaaaataaataaaataaaaaagtaaataaataaagaaagaaagggaaataagaattataagcaaatagcttctgagcccacatccagagttttttgtttgtttgtttgttttgttgtgttttttttttgagatggagttccgctcttgttgcccaggttggcgtgcagtggcacgatctcagctcactgcaacctccatctcccgggttcaagcgattctcctgcctcagcctcccgagtagctgggattacaggtgtgtgccacctggggagaaaccccagagatcgggtttctccatgttggttagtctggtctcaaactcccaacctcaggtgatccgcccgtctcggcctcccaaaatgctgggattacaagcgtgagccaccacacccagccccaacatccagagtttttggagaacagaagcgagggtgtggaacccaacctggggtttcaagggaggagatggcctttgaagagcaaaagagagtctgtgaggcgtgggagatgtgactcacttatttatgaaaggcgtggcttacacttaaggcatactgaactctaagggaccacaaaagaggagcctatgcatctgatgagttgaagtgtttagaaaacagctattgcagatttttgttaaaacacccagctcctttcccttcttagatggagaacaagcgttagagctttcagacttcaggattttcttcttgggctaacattggtctgattgtccagctcggattctgtctgcactgggcgaaactcctccatgtggttcggggggaatcatttcagctcaccgcttaggatgacgcatagggcatctccacagagttttggccacttgcatcctagagcttgatgcttttcctgagatacgcgcccttggtgggtggtagtttctgcatctggtctcacccactccagttcttcctcacctccatcaaggtgaactttgtagaaacactcttctgcttccagtccttcaaagacattttttagccctaaggataaaacccataccccataccacagctaacaaactggagtttggctgggtgtggtggctcacgcctgtaattccagcactttaggaggccaaggtgggcacatcacttgacaggagttcaagaccagcctggccaacatggcgaaatcccatctctactgaaaatgcaaaaattagccagatgtggcggtgcacgggagaacctgggagacagaggttgcagtgatctgagattgcactgctgcactccagcccgggcaacagactgagactctgtctcaaaacaaacaaacaaaaccaacaaaaccccaaactgatttcttctccactcttctctcttgcagtggtctttggatgagccctcccttcatctgtgtgatgggttcatcctggtgcactctccacttcctctgtttaattagtttctactcactacttaggtctcagttgtacacgagggcctcaggaaagctttcgtggatgcctcgggtgttctgtgatggtccttgctgctttctgtggtggctgttcaatcatctgaccactacattgggttgaatagcatcctccctaaattcatgtccatctagaacctcagaatgtgaccatatttggaaacagggtctttgcaaatgttattaattaaggctctcgatgatctcagaatcgatttagggtgggtcctaaatccagtgacatttccttataagaagaggagaagacacagggacacacagagagagatggtgacgtgaagatggaggcagagattggagccatgcctctacaagccaggaacaccaaggaccgctggcaaccagcagaacaaggagagaggcatggaacagattctccctcagagcctccagaaggtaccagcccggccgacatcttgatttcagacttttagcctcctgtactgtacttttttttttttttttttttgacggagtcttgctctgtcgcccaggttggagtgcagtagtgcgatcttggctcactgcaacctccacctcccaggttcaagcgattctccagcctcagcctcccaagtagctgggattacaagcatctgctgccatgcctggctaatttttgtatttttgtagagatggggtttcaccatgttggctaggctactctcgaacccctgacctcaagtgatccactcgccttggcctcccaaagtgctgcgattacaggtctgagccaccacgcctggcctgtactgttgttttaagccacacagcttgtggtaatttgttatggcagccacagaaaacttacacacctccctcctagctctggacttcaggaagaaaaatgcctcatctgttctttcccgcttatattcctagcatgtaacacagtgcttggtacgtagtgggcaattaataaatatttgttcatcaataaatgggctctaggagctcaagatgccctggaatgtcaccccaaattttgcatgtaggaatacttttctggggagagagttcatccattcatgaacatttaccagattctccaaagggcgtgggttgccaaatgcttaggaacttccgctttcagtgtttagcaggttagcggggaaatattagtcccattatttaagctgagatttgcgaggcctacacgttttttttttctcatgtgctgtctctactgtcacactctcatcctgagcagaaaggaggactcaggggtcagatgccaaatgtggttcgttgggctctccttctccccacccccttatgaaagtgtttctttccatctgagccttgtgacagtggccaggtggctagccctctggcctgaggtcgacggcttttcattcttctttgttgacaggaaagccgggcttcctgtgaggccatgaactgattcatcgctggtttctcccactgcctactcacggccagtggggaaccatgactttcagacacgaactcttattgcccaacagggtctggggtgactagctgggactgcacgctcaagccaccacgcccggttctgttgcctcctttttatttgtgcatgaattttctaggactgctggaacaaattactccaaactggacagcttaaaatgttactttgttctggccaggcacagtggctcacacctgtaatcccagcactttgggaggccgaggcgggcagatcacgaggtcaggagatcaagaccatcctggctaacgtggtgaaacgctgtcactactaaaaatacaaaaaattagccgggcatggtggcaggtgcctgtagtcccagctactcaggaggctgaggcaggagaatggcgtgaacccgggaggcagagattgcagtgagccgagattgcgccactgcactccagcctgggtgacagagtgagactccatctcaaaaaaaacaaaaataaaaacaaaaaaacattactttgtcctttcacagttcggagagccagaagtccaaaatcaaggttatgactgaaggctctgacagagaatccattccttgcctctctcctggattctggtgcctgctggaatccttggcattctgggcttctagactcctatctccgcctcagttgttatgaggcgttctttcatgccagtgtccagactcccctcctctaataaaaataccagtctttggattgaaggcccaccctactccagtatgacctcatcttaacttaatgacatctgcgaagacgctatctccaaataaggtcacgtcacaggttctggattgatatgaaattgaggggaacgctgttcagtctggtgcaattagctgtattacgtatctctctctctctcttttttttttttttgagacacagtttcactctgttgcccaggctggagtgcagtggtgcaatcttggctcactgcaacctccgcctccgggttcaagcgattctcctgcctcggccttctgagtagctggaattacaggca
